(19) United States
(12) Patent Application Publication
(10) Pub. No.: US 2022/0184174 A1
(43) Pub. Date: Jun. 16, 2022

(54) LANTIBIOTICS AND LANTIBIOTIC-PRODUCING BACTERIA

(71) Applicants: UNIVERSITY COLLEGE CORK - NATIONAL UNIVERSITY OF IRELAND, CORK, Cork (IE); TEAGASC, THE AGRICUL TURE AND FOOD DEVELOPMENT AUTHORITY, Carow (IE)

(72) Inventors: Reynolds Paul ROSS, Graigue (IE); Catherine Stanton, Graigue (IE); Colin Hill, Cork (IE); Anthony Ryan, Cork (IE); Julie O'Sullivan, Cork (IE); Claire Watkins, Cork (IE)

(21) Appl. No.: 17/436,512

(22) PCT Filed: Mar. 4, 2020
(86) PCT No.: PCT/EP2020/055623

§ 371 Date: Sep. 3, 2021

(30) Foreign Application Priority Data
Mar. 4, 2019 (EP) 19160469.3

(51) Int. Cl. A61K 38/16; C12N 1/20; C12N 15/74; C07K 14/31; A61P 31/04; A61K 35/00

(52) U.S. Cl. CPC A61K 38/164; C12N 1/205; C12N 15/746; C12R 2001/44; A61P 31/04; A61K 35/00; C07K 14/31

(57) ABSTRACT

An isolated lantibiotic is provided comprising amino acid sequence SEQ. ID No. 2 and at least one of amino acid sequences SEQ. ID No. 4 and SEQ. ID. No 6. Also provided is use of the lantibiotic in the treatment or prevention of infection by Group B Streptococcus or Corynebacterium xerosis. The invention further relates to isolated S. hominis strains and use of same in producing the lantibiotic. A vector is provided comprising nucleotides sequences for producing the lantibiotic.

### FIELD OF THE INVENTION

[0001] The present invention relates to lantibiotics and to lantibiotic-producing bacteria, including methods of making the lantibiotics and methods of using the lantibiotics in the treatment and prevention of bacterial infection, in particular infection with Group B Streptococcus (GBS).

### BACKGROUND OF THE INVENTION

[0002] Given the public health threat posed by antibiotic resistance, alternative prophylactic options are currently being explored. Ribosomally synthesised antimicrobial peptides of bacterial origin, also known as bacteriocins, with narrow to broad spectrum activity are known to be effective in the prevention and treatment of pathogenic microorganisms, alongside other alternatives such as phage therapy, vaccines, probiotics and endo- or exolysins. Bacteriocins can be classified as either class I, post-translational modified peptides, or class II, largely unmodified peptides. Ribosomally synthesised, Post translationally modified Peptides (RiPPs) have also been adopted as a suitable nomenclature for all modified (class I) peptides. Lantibiotics (lanthionine-containing antibiotics) are a subgroup of RiPPs which involve the formation of lanthionine (Lan) and methyllanthionine (MeLan) bridges. The dehydration of serine (Ser) and threonine (Thr) residues to form 2,3-didehydroalanine (Dha) and 2,3-didehydrobutyrine (Dhb) residues, respectively, is followed by reaction with a cysteine (Cys) residue to form either a Lan or a MeLan bridge. The formation of Lan/MeLan bridges is catalysed by a multifunctional LanM modification enzyme in type II (class IB) lantibiotics such as lacticin 3147, licheniciden, formicin and mersacidin. However, in type I (class IA) lantibiotics, such as nisin and epidermin, this modification is performed by separate LanB and LanC enzymes.

[0003] Alongside the previously mentioned peptide modification enzymes (LanM, LanB and LanC), there are a number of other genes essential for lantibiotic synthesis. These genes are involved in either the biosynthesis of or immunity to lantibiotics. Following post translational modification of the structural peptides, ABC (ATP binding cassette) transporters (LanT) are present to export the lantibiotic from the cell. This exporting process can also provide immunity (LanFEG) to the cell by pumping the lantibiotic out and away from the cell wall, preventing self-damage. During this stage of lantibiotic production, a proteolytic process is carried out either during or after transport by a protease (lanP) enzyme, which cleaves the leader peptide from the active core-peptide.

[0004] Within the lantibiotic group, type IB, is a subgroup of two-component lantibiotics. This interesting cluster requires a gene cassette with two structural peptides, described as α and β peptides, which work synergistically to produce antimicrobial activity. The mode of action in two-component lantibiotic systems is of particular interest where two LanM modification enzymes are required to catalyse each prepeptide individually in the gene cassette. For example, in lacticin 3147, antimicrobial activity occurs when the a peptide binds to lipid II in the peptidoglycan cell wall and inhibition of cell wall synthesis occurs only when the peptide is present, forming small pores in the cell membrane. Previously identified two-component lantibiotics have been isolated from a range of different microorganisms including Staphylococcus aureus (staphylococcin C55) (Navaratna et al., 1998), Lactococcus lactis (lacticin 3147) (Ryan et al., 1996), Lactobacillus plantarum (plantaricin W)(Holo et al., 2001), Bacillus licheniformis (lichenicidin) (Begley et al., 2009), Bacillus halodurans (haloduracin) (McClerren et al., 2006), Enterococcus faecalis (enterocin W) (Sawa et al., 2012) and Bacillus paralicheniformis (formicin) (Collins et al., 2016). In addition to eliminating numerous pathogens, these lanthipeptides are considered a probiotic trait due to their ability to modulate the composition of the microbiota and influence host immune systems.

[0005] Group B Streptococcus (GBS), also known as Streptococcus agalactiae, is a gram-positive, coccus shaped, catalase negative commensal organism found to be resident or transient in the gastrointestinal and genitourinary tracts. It is estimated that 15-30% of woman are asymptomatic carriers of GBS, of which half will transmit GBS to their infants, leading to ˜2-3% of infants being born with the invasive organism. As a leading cause of neonatal infection, and indeed neonatal mortality, GBS maternal transmission is the primary route of the disease. Current recommendations to reduce the rate of infection include late-gestational screening for GBS in pregnant women and intrapartum antibiotic prophylaxis (IAP) for GBS-positive mothers. Intravenous administration of ampicillin, penicillin, clindamycin or vancomycin at the onset of labour have been found to be effective in the prevention of GBS transmission from mother to infant. However, IAP during labour can have a significant impact on the infant microbiome. Moreover, a Cochrane review carried out to assess the impact of maternal IAP on neonatal GBS infections concluded that there is lack of evidence to recommend IAP to reduce neonatal early-onset group B streptococcal disease. There is a need therefore for a new treatment for the prophylactic prevention of GBS colonisation in both mother and infant.

[0006] Corynebacterium xerosis, a Gram positive, non-lipophilic skin commensal, has been found to colonise the nasopharynx, conjunctiva and the vagina. C. xerosis has been associated with cases of pneumonia, sepsis and conjunctivitis. However, it is considered a putative pathogen due to its non-toxic and non-motile phenotype. Typically, C. xerosis has been found in clinical specimens of immunocompromised individuals and further study is required to determine its pathology.

### SUMMARY OF THE INVENTION

[0007] The present inventors have identified a two-component lantibiotic, named Homicin, that is produced by vaginal isolate Staphylococcus hominis APC 3675 and skin isolates Staphylococcus hominis APC 2924 and APC 2925.

[0008] Accordingly, according to a first aspect of the present invention, there is provided an isolated lantibiotic comprising:
[0009] amino acid sequence SEQ. ID No. 2 or a variant amino acid sequence having at least 90% amino acid sequence identity thereto, and
[0010] at least one of:
   [0011] amino acid sequence SEQ. ID No. 4 or a variant amino acid sequence having at least 90% amino acid sequence identity thereto, and
   [0012] amino acid sequence SEQ. ID. No 6 or a variant amino acid sequence having at least 90% amino acid sequence identity thereto.

[0013] SEQ ID No. 2, 4 and 6 relate to the active core amino acid sequences of Homicin α-peptide and β-peptides (homβ1 and homβ2) respectively. The lantibiotic is a two-component lantibiotic—the α and β peptide work synergistically to produce antimicrobial activity. The structural prediction of the active two-component lantibiotic is shown in FIG. 6. The two-component lantibiotic may comprise amino acid sequence SEQ. ID No. 2 and at least one of amino acid sequence SEQ. ID No. 4 and amino acid sequence SEQ. ID. No 6. The two-component lantibiotic may comprise amino acid sequence SEQ. ID. No. 2, amino acid sequence SEQ. ID. No. 4 and amino acid sequence SEQ. ID. No. 6. Alternatively, the two-component lantibiotic may comprise amino acid sequence SEQ. ID. No. 2 and amino acid sequence SEQ. ID. No. 4 or may comprise amino acid sequence SEQ. ID. No. 2 and amino acid sequence SEQ. ID. No. 6. Typically, the ratio of SEQ ID. No. 2 : SEQ ID No. 4 and/or 6 is 1:1.

[0014] The two-component lantibiotic is a Staphylococcus hominis lantibiotic. The two-component lantibiotic, or one or more of the amino acid sequences thereof, is obtainable by culturing S. hominis APC 3675 NCIMB 43358, S. hominis APC 2924 NCIMB 43356 or S. hominis APC 2925 NCIMB 43357. The two-component lantibiotic, or one or more of the amino acid sequences thereof, may be isolated from S. hominis APC 3675 NCIMB 43358, S. hominis APC 2924 NCIMB 43356 or S. hominis APC 2925 NCIMB 43357.

[0015] The invention further extends to a pharmaceutical composition comprising the two-component lantibiotic of the invention and a pharmaceutically acceptable carrier.

[0016] According to a further aspect of the invention, there is provided the two-component lantibiotic of the invention for use as a medicament.

[0017] In particular, there is provided the two-component lantibiotic of the invention for use in inhibiting or preventing the growth of a bacterium. The invention provides a method for inhibiting or preventing the growth of a bacterium comprising contacting a bacterium with an effective amount of the two-component lantibiotic of the invention. The invention further provides for use of the two-component lantibiotic of the invention in the preparation of a medicament for inhibiting or preventing the growth of a bacterium. Inhibiting or preventing the growth of a bacterium includes inhibiting or preventing colonisation of bacteria, for example, on human skin or vagina. The bacteria may be pathogenic gram positive bacteria (e.g. staphylococci or streptococci).

[0018] The two-component lantibiotic of the invention is disclosed for use as an anti-microbial agent, in particular, for preventing or treating a bacterial infection. The invention provides a method for preventing or treating a bacterial infection comprising administering to a subject in need of treatment an effective amount of the two-component lantibiotic of the invention. The invention further provides for use of the two-component lantibiotic of the invention in the preparation of a medicament for use as an anti-microbial agent, in particular, for preventing or treating a bacterial infection.

[0019] The invention further extends to isolated amino acid sequences of the two-component lantibiotic of the invention.

[0020] Accordingly, according to a further aspect of the invention there is provided an isolated amino acid sequence comprising, consisting essentially of or consisting of amino acid sequences of SEQ. ID. No: 2, SEQ ID NO: 4 or 6, or variant amino acid sequence having at least 90% amino acid sequence identity thereto.

[0021] The variant amino acid sequence may have at least 91%, 92%, 93%, 94%, 95%, 96%, 97%, 98% or 99% sequence identity with amino acid SEQ ID No. 2, 4 or 6. The variant amino acid sequence may have 95%, 98% or 99% sequence identity with amino acid SEQ ID No. 2, 4 or 6.

[0022] The variant amino acid sequence may differ from the amino acid sequence on which it is based due to the presence of one or more conservative amino acid substitutions. Typically, the variant amino acid sequence differs from the amino acid sequence on which it is based due to the presence of less than 5, 4, 3, 2 or 1 conservative amino acid substitutions. The only differences between the variant amino acid sequence and the amino acid sequence on which it is based may be conservative amino acid substitutions, that is, no non-conservative amino acid residue alterations are present.

[0023] In certain embodiments, the variant amino acid sequence may not include any amino acid substitutions at positions identified as containing amino acid residues involved in forming a lanthionine bridge or amino acids which are dehydrated, i.e. serine (Ser) and threonine (Thr) residues which are dehydrated to form 2,3-didehydroalanine (Dha) and 2,3-didehydrobutyrine (Dhb) residues, respectively.

[0024] In certain embodiments, the variant amino acid sequence may include one or more, preferably less than 3 and more preferably less than 2, truncations, substitutions, deletions or insertions.

[0025] Typically, the two-component lantibiotic comprising one or more variant amino acid sequences as above retains anti-microbial activity. Typically, the two-component lantibiotic has the same or improved anti-microbial activity when compared to the two-component lantibiotic comprising amino acid sequence SEQ. ID No. 2 and at least one of amino acid sequence SEQ. ID No. 4 and amino acid sequence SEQ. ID. No 6, i.e. the changes to the amino acid sequences do not result in any loss of anti-microbial activity.

[0026] The invention further extends to isolated nucleic acid molecules encoding for the two-component lantibiotic of the invention. The nucleic acid molecules may encode the amino acid sequences which make up the two-component lantibiotic as described above.

[0027] Accordingly, according to a further aspect of the invention there is provided an isolated nucleotide sequence encoding a polypeptide comprising amino acid sequence SEQ. ID No. 2, 4 or 6.

[0028] The isolated nucleotide sequence of the invention may comprise, include, consist essentially of or consist of SEQ ID No.15, 17 or 19 or a variant nucleotide sequence which has at least 90% sequence identity to

### (a) SEQ ID No.15, 17 or 19, or

[0029] (b) a nucleotide sequence that is capable of hybridising to SEQ ID No.15, 17 or 19 under stringent conditions.

[0030] Typically, said isolated nucleotide sequence encodes an amino acid sequence which may be combined with one or more further amino acid sequences to form a two-component lantibiotic having anti-microbial activity.

[0031] The variant nucleotide sequence may have at least 91%, 92/%, 93%, 94%, 95%, 96%, 97%, 98% or 99% sequence identity with SEQ ID No.15, 17 or 19 or a nucleotide sequence that is capable of hybridising to SEQ ID No.15, 17 or 19 under stringent conditions. The variant nucleotide sequence may have at least 95%, 98% or 99% sequence identity with SEQ ID No.15, 17 or 19 or a nucleotide sequence that is capable of hybridising to SEQ ID No.15, 17 or 19 under stringent conditions. The variant nucleotide sequence may have at least 100% sequence identity with a nucleotide sequence that is capable of hybridising to SEQ ID No.15, 17 or 19 under stringent conditions.

[0032] In certain embodiments, the isolated nucleotide sequence is obtained from S. hominis APC 3675 NCIMB 43358, S. hominis APC 2924 NCIMB 43356 or S. hominis APC 2925 NCIMB 43357. In certain embodiments, the isolated nucleotide sequence is obtainable by culturing S. hominis APC 3675 NCIMB 43358, S. hominis APC 2924 NCIMB 43356 or S. hominis APC 2925 NCIMB 43357.

[0033] Also provided is an isolated plasmid comprising a nucleotide sequence encoding a polypeptide comprising amino acid sequences SEQ. ID No. 2, 4 and 6, optionally wherein the nucleotide sequence further encodes one or more of SEQ ID No. 1, 3, 5, 7, 8, 9, 10, 11, 12 and 13. In certain embodiments, the nucleotide sequence encodes a polypeptide comprising amino acid sequences SEQ. ID No. 2, 4, 6, 1, 3, 5, 7, 8, 9, 10, 11, 12 and 13. In certain embodiments, the plasmid comprises SEQ ID No. 15, 17 and 19, optionally wherein the plasmid further comprises one or more of SEQ ID No. 14, 16, 18, 20, 21, 22, 23, 24, 25 and 26. In certain embodiments, the plasmid comprises SEQ ID No. 34, 35 and 36. In certain embodiments, the plasmid comprises SEQ ID No. 20 and 21. In certain embodiments, the plasmid comprises SEQ ID No. 22. In certain embodiments, the plasmid comprises SED ID No. 23, 24, 25 and 26. In certain embodiments, the plasmid comprises SEQ ID No. 34, 35, 36, 20, 21, 22, 23, 24, 25 and 26. The invention further extends to all strains comprising the plasmid of the invention.

[0034] The invention further extends to an isolated polypeptide encoded by an isolated nucleotide sequence of the invention. Preferably there is provided a polypeptide sequence encoded by a nucleotide sequence comprising, consisting essentially of or consisting of SEQ ID No.15, 17 or 19 or a variant nucleotide sequence as described above. Suitably a polypeptide of the invention will have anti-microbial activity when combined to form the two-component lantibiotic of the invention.

[0035] According to a further aspect of the present invention there is provided an isolated S. hominis strain selected from the group consisting of S. hominis APC 3675 deposited under NCIMB 43358, S. hominis APC 2924 deposited under NCIMB 43356 and S. hominis APC 2925 deposited under NCIMB 43357. The genome sequence for S. hominis APC 3675 is provided as SEQ ID No. 39. The genome sequence for S. hominis APC 2924 is provided as SEQ ID No. 37. The genome sequence for S. hominis APC 2925 is provided as SEQ ID No. 38.

[0036] Also provided is an isolated strain which produces the lantibiotic of the invention.

[0037] The invention extends to the isolated strain of the invention for use as a medicament. In particular, the invention extends to the isolated strain of the invention for use in inhibiting or preventing the growth of a bacterium. The invention provides a method for inhibiting or preventing the growth of a bacterium comprising contacting a bacterium with an effective amount of the strain of the invention. The invention further provides for use of the strain of the invention in the preparation of a medicament for inhibiting or preventing the growth of a bacterium. Inhibiting or preventing the growth of a bacterium includes inhibiting or preventing colonisation of bacteria, for example, on human skin or vagina. The bacteria may be pathogenic gram positive bacteria (e.g. staphylococci or streptococci).

[0038] The invention further extends to the isolated strain of the invention for use in preventing or treating a bacterial infection. The invention provides a method for preventing or treating a bacterial infection comprising administering to a subject in need of treatment an effective amount of the strain of the invention. The invention further provides for use of the strain of the invention in the preparation of a medicament for preventing or treating a bacterial infection.

[0039] The invention further extends to the isolated strain of the invention for use as a probiotic food and to a probiotic food comprising at least one of the isolated strains of the invention.

[0040] The isolated strain of the invention may be provided for use as a live biotherapeutic. As such, the invention extends to a live biotherapeutic comprising the strain of the invention. Also provided is use of the strain in killing or displacing or inhibiting or preventing colonisation of pathogenic gram positive bacteria (e.g. staphylococci or streptococci) on human skin or vagina. The present invention also extends to an isolated nucleotide sequence, or a fragment thereof, obtainable by culturing, or derived from, the strain of the invention, wherein the nucleotide sequence encodes for an amino acid sequence of the two-component lantibiotic of the invention.

[0041] The present invention further extends to an isolated polypeptide, or a fragment thereof, obtainable by culturing, or derived from, the strain of the invention, wherein the polypeptide forms at least part of the two-component lantibiotic of the invention.

[0042] According to a further aspect of the invention, there is provided a method for producing the two-component lantibiotic of the invention.

[0043] The method may comprise combining amino acid sequence SEQ. ID No. 2 or a variant amino acid sequence having at least 90% amino acid sequence identity thereto with at least one of:
[0044] amino acid sequence SEQ. ID No. 4 or a variant amino acid sequence having at least 90% amino acid sequence identity thereto, and
[0045] amino acid sequence SEQ. ID. No 6 or a variant amino acid sequence having at least 90% amino acid sequence identity thereto.

[0046] In certain embodiments, amino acid sequence SEQ. ID No. 2, or a variant amino acid sequence having at least 90% amino acid sequence identity thereto, is combined with both amino acid sequence SEQ. ID No. 4, or a variant amino acid sequence having at least 90% amino acid sequence identity thereto, and amino acid sequence SEQ. ID. No 6, or a variant amino acid sequence having at least 90% amino acid sequence identity thereto.

[0047] In certain embodiments, the amino acid sequences are produced using the nucleotide sequences of the invention. The two-component lantibiotic of the invention can be chemically synthesized using established methods.

[0048] Alternatively, the amino acid sequences may be isolated and purified from the strains of the invention which naturally produce the two-component lantibiotic or from a recombinant lantibiotic-producing bacteria (e.g., Lactococcus lactis or E. coli). In particular, the two-component lantibiotic of the invention can be produced by culturing naturally occurring lantibiotic-producing S. hominis strains of the invention or by culturing a lantibiotic-producing recombinant, and then isolating and/or purifying the lantibiotic using known techniques.

[0049] Accordingly, according to a further aspect of the invention, there is provided a method for producing the two-component lantibiotic of the invention, comprising cultivating at least one of the strains of the invention or a host cell comprising the vector of the invention under conditions suitable for the production of the two-component lantibiotic of the invention and optionally isolating or purifying the two-component lantibiotic of the invention from the strain. The host cell may be a bacterial cell and/or an insect cell and/or a yeast cell and/or a plant cell.

[0050] Precursor lantibiotic peptides are generally first modified and then become biologically active by proteolytic cleavage of the leader peptide from the mature peptide. The invention further provides amino acid sequences comprising precursor leader sequences and the active core peptides of SEQ ID No. 2, 4 and 6 respectively. The amino acid sequences of the leader “precursor” peptides are shown as SEQ ID No. 1 (HomA), 3 (homβ1) and 5 (homβ2). The complete amino acid sequences comprising both the precursor leader sequences and the active core peptides are shown as SEQ ID No. 31 (HomA), 32 (homβ1) and 33 (homβ2).

[0051] The invention further provides isolated nucleotide sequences encoding precursor leader sequences and the active core peptides of SEQ ID No. 2, 4 and 6 respectively. The nucleotide sequences encoding the leader “precursor” peptides are shown as SEQ ID No. 14 (HomA), 16 (homβ1) and 18 (homβ2). The complete nucleotide sequences encoding the precursor leader sequences and the active core peptides are shown as SEQ ID No. 34 (HomA), 35 (homβ1) and 36 (homβ2).

[0052] The invention further extends to an isolated lantibiotic modifying enzyme which effects dehydration and cyclization of a peptide or polypeptide and to an isolated nucleic acid molecule encoding same. In one embodiment, the modifying enzyme is homM1 having the amino acid sequence of SEQ ID No. 7. In another embodiment, the modifying enzyme is homM2 having the amino acid sequence of SEQ ID No. 8. Also provided is an isolated nucleotide sequence encoding for the modifying enzyme homM1 or homM2. The nucleotide sequence may comprise SEQ ID No. 20 (homM1) or 21 (homM2). Also provided is a vector comprising the nucleic acid molecule and a host cell comprising the vector.

[0053] The invention further extends to a method for modifying a peptide or polypeptide comprising contacting a peptide or polypeptide with a lantibiotic modifying enzyme, thereby effecting dehydration and cyclization of the peptide or polypeptide.

[0054] Enzymes that modify the lantibiotic peptides (homM1 and homM2) can be co-expressed by a recombinant host cell which expresses the alpha and beta peptides to provide in vivo modification of the peptides, or alternatively the modifying enzymes can be provided in an in vitro reconstitution reaction to modify the alpha and beta peptides. Accordingly, contact of a lantibiotic peptide with the modification enzymes specifically encompasses both in vivo and in vitro embodiments. The modification enzymes act upon an alpha or beta lantibiotic peptide so as to effect both at least one dehydration reaction and at least one cyclization reaction.

[0055] The invention further provides lantibiotic protease (homP) having the amino acid sequence of SEQ ID No. 9 and an isolated nucleotide sequence encoding for the protease. The nucleotide sequence is shown as SEQ ID No. 22.

[0056] Also provided are lantibiotic transporter (homT) having the amino acid sequence of SEQ ID No: 10 (ORF_T (46) ABC transporter BmrA), 11 (ORF_C (37) ABC transporter Yxlf), 12 (ORF_B (36) ABC transporter) or 13 (ORF_R (23) ABC transporter HisP regulator) and an isolated nucleotide sequence encoding for one or more of these sequences. The nucleotide sequences are shown as SEQ ID No. 23 (ORF_T (46) ABC transporter BmrA), 24 (ORF_C (37) ABC transporter Yxlf), 25 (ORF_B (36) ABC transporter) and 26 (ORF_R (23) ABC transporter HisP regulator).

[0057] The nucleic acid molecules of the invention can include at least the protein-coding portions of the HomA precursor peptide gene (SEQ ID No. 15) and at least one of the HomB1 (SEQ ID No. 17) and HomB2 (SEQ ID No. 19) precursor peptide genes. The nucleic acid molecules of the invention may further include the HomM1 (SEQ ID No. 20) and HomM2 (SEQ ID No. 21) modification enzyme genes. The nucleic acid molecules of the invention may further include one or any combination of, including all of, the HomP (SEQ ID No. 22), HomT (SEQ ID No. 23-26). The invention extends to nucleic acids comprising, consisting essentially of, or consisting of those specific sequences or a combination thereof.

[0058] The invention further provides a gene construct comprising or including one or more isolated nucleic acid molecules according to the invention and a control sequence, for example a promoter. There is further provided a vector including at least one of the nucleic acid molecules according to the invention. The vector may include a promoter which is operably linked to said nucleic acid molecule. Suitable vectors include viruses (e.g. Vaccinia virus, adenovirus, baculovirus etc), yeast vectors, phage, chromosomes, artificial chromosomes, plasmids or cosmid DNA. The vector may be a plasmid. The vector may be introduced into an organism such as Lactococcus lactis or E. coli. The invention extends to a host cell comprising the vector of the invention.

[0059] The nucleic acid molecules of the present invention can be expressed separately, i.e., inserted into separate vectors for expression and purification of individual gene products, namely alpha and beta peptides, modifying enzymes, protease and transporters, or alternatively collectively (e.g., as a gene cluster) inserted into a vector as an expression cassette.

[0060] The present invention further extends to a process for making an organism suitable for producing the two-component lantibiotic of the invention or a peptide thereof comprising the step of introducing an isolated nucleic acid molecule of the invention into the organism. In certain embodiments, the organism is Lactococcus lactis or E. coli.

[0061] The present invention further extends to a recombinant organism comprising an isolated nucleic acid molecule of the present invention. In certain embodiments, the organism is Lactococcus lactis or E. coli.

[0062] Suitably, the nucleic acid molecules of the present invention may be expressed to provide polypeptides.

[0063] According to a further aspect of the invention there is provided a method of producing a polypeptide encoded by a nucleic acid molecule of the invention, the method comprising the steps of:

(a) contacting a bacterial cell and/or an insect cell and/or a yeast cell and/or a plant cell with a vector as described herein, and
(b) cultivating said bacterial cell and/or insect cell and/or yeast cell and/or plant cell under conditions suitable for the production of the polypeptide.

[0064] Suitably the bacterial cell may be Lactococcus lactis or Escherichia coli. Suitably the polypeptide is encoded by a nucleotide sequence comprising SEQ ID No. 15, 17 or 19. In certain embodiments, the polypeptide is encoded by a nucleotide sequence derived from or obtainable by culturing S. hominis APC 3675 NCIMB 43358, S. hominis APC 2924 NCIMB 43356 or S. hominis APC 2925 NCIMB 43357.

[0065] The invention further provides a polypeptide produced substantially from the above method. As will be understood by those of skill in the art, such a polypeptide may be isolated or substantially purified from the mixture in which it is expressed. Suitably a polypeptide of the invention may be combined to form the two-component lantibiotic of the invention having anti-microbial activity.

[0066] According to a further aspect of the present invention, there is provided a method comprising contacting a precursor peptide containing the amino acid sequence for homA1 (SEQ ID No. 31) with a precursor peptide containing the amino acid sequence for homβ1 (SEQ ID No. 32) and/or homβ2 (SEQ ID No. 33. The method may further comprise contacting the precursor peptides with one or more of the two identified lantibiotic modification enzymes encoded by ORF38 (HomM1) and ORF42 (HomM2) capable of effecting dehydration and cyclization of the precursor peptide (SEQ ID No. 7 and 8), the lantibiotic protease (HomP) required to cleave the leader peptide from the precursor peptides (SEQ ID No. 9) and the ABC transporter-related peptides encoded by ORF23, ORF36 and ORF37 (SEQ ID No. 13, SEQ ID No. 12 and SEQ ID No. 11 respectively) and the peptide responsible for the transport of the novel antimicrobial encoded by ORF46 (SEQ ID No. 10).

[0067] The invention further extends to a kit for producing the two-component lantibiotic of the invention comprising precursor peptide HomA1 (SEQ ID No. 31) and at least one of precursor peptides HomB1 (SEQ ID No. 32) and/or HomB2 (SEQ ID No. 33) in combination with modifying enzymes HomM1 (SEQ ID No. 7) and HomM2 (SEQ ID No. 8) for producing the two-component lantibiotic of the invention. The kit may further comprise lantibiotic protease (homP) having the amino acid sequence of SEQ ID No. 9. The kit may further comprise the amino acid sequences for one or more of homT comprising the amino acid sequence of SEQ ID No. 10, 11, 12 and 13. The kit of the present invention may contain buffers suitable for carrying out dehydration and cyclization of the precursor peptides and/or an instruction manual.

[0068] The invention further provides a method of identifying putative lantibiotics comprising screening a genome sequence for the presence of a sequence having similarities to the LanM modification enzyme (e.g. homM1 or homM2). The method may be used to identify putative lantibiotic operons. Sequence similarity may be defined as having at least 30, 35, 40, 45, 50, 55, 60, 65, 70, 75, 80, 85, 90 or 95% sequence identity with a known LanM modification enzyme (e.g. homM1 or homM2).

### BRIEF DESCRIPTION OF THE FIGURES

[0069] The invention will be more clearly understood from the following description of some embodiments thereof, given by way of example only, with reference to the following figures in which:

[0070] FIG. 1 shows: A) Antimicrobial producing isolate Staphylococcus hominis APC 3675 showing antimicrobial activity against Streptococcus agalactiae APC 1055. B) Spot assay of S. hominis APC 2924 against Lb. delbrueckii ssp. bulgaricus LMG 6901. C) Well diffusion assay of S. hominis APC 2925 against Lb. delbrueckii ssp. bulgaricus LMG 6901.

[0071] FIG. 2 shows MALDI-TOF MS of active fractions displaying the masses of the peptides produced by Stapylococcus hominis APC 3675 (3396.4 Da-homA1 (FIG. 2A); 3014.9 Da-homβ1; 3300.5 Da-homβ2 (FIG. 2B)).

[0072] FIG. 3 shows Lanthipeptides purified by RP-HPLC display antimicrobial activity and synergy in well diffusion assay against indicator organism L. delbrueckii subsp. bulgaricus LMG 6901.

[0073] FIG. 4 shows sequence alignment of homicin structural peptides. The desktop application Jalview was used to align amino acid residues calculated by Clustal Omega. The homicin peptides homA1(α-peptide) (top image), homβ1 (middle image) and homβ2 (bottom image) were aligned against the previously described two-component bacteriocins. The percentage amino acid identities of each peptide with the homicin peptides are shown. The serine (S) residues, threonine (T) and cysteine (C) have been highlighted to indicate areas of homology and possible modifications in the structural peptides. The numbers at the bottom of image represent the predicted dehydrations for each structural peptide.

[0074] FIG. 5 shows predicted two-component lantibiotic operon representation of bagel4 output of the three S. hominis strains: APC 3675, APC 2924 and APC 2925. The homicin operon appears to contain one gene encoding the Hom a-peptide and two genes encoding homβ1 and homβ2 peptides. HomM1 (left—orf M1) and homM2 (right—orf M2) encode the accompanying modification enzymes. HomT and homP are involved in bacteriocin transport and leader cleavage, respectively.

[0075] FIG. 6 shows Homicin structural prediction. The structures of the homicin αand β peptides were predicted using the Ltna and Hala structures and the Halβ and Lichβ structures as templates. The conservation of key amino acids suggests a structural homology between the peptides. The rings formed from lanthionine and methyllanthionine bridges are labelled alphabetically and Ser/Thr dehydrations highlighted.

[0076] FIG. 7 shows the BLAST Ring Image Generator (BRIG) used to visually compare the S. hominis, Homicin operon, present within the three draft genomes. S. hominis APC 3675 was used as a reference sequence due to the higher degree of coverage from the sequencing platform.

[0077] FIG. 8 shows biosynthetic gene cluster detected by antiSMASH in the 3 S. hominis strains APC 3675, APC 2924 and APC 2925 with 75% similarity to a prevalent siderophore, staphyloferrin A.

[0078] FIG. 9 shows PFGE profile of 3 S. hominis strains APC 2925, APC 2924 and APC 3675.

[0079] FIG. 10 shows differences in gene composition between the 3 S. hominis strains on contig containing homicin operon—the same colour represents the same amino acid sequence of gene.

[0080] FIG. 11 shows that colony mass spec results of the 3 S. hominis strains again shows a difference between APC 3675 (vaginal isolate) to APC 2924 and APC 2925 (skin isolates) with the skin isolates showing an extra peak on the left hand side at ˜2370Da.

[0081] FIG. 12 shows that the colour difference observed in cell preparation of S. hominis strain APC 3675 (far left of image) and S. hominis strains APC 2924, APC 2925 prior to purification is quite obvious, suggesting APC 3675 is different to the other 2 S. hominis strains in this study.

[0082] FIG. 13 shows Bagel3 identification of a putative lantibiotic operon in V. dokdonesis DSW-10. S. hominis APC 3675 HomM modification enzymes were found to be 38% identical to the LanM displayed here in the putative operon. The structural peptides identified above for ORF20 and ORF22 have 42% and 38% identity to haloduracin and lichenicidenVK21 α-peptides. This putative operon has not previously been published in the literature for V. dokdonesis DSW-10.

[0083] FIG. 14 shows a chromatogram of the semi-purification of APC 3675 by RP-HPLC demonstrating that the beta peptides (β1 and β2) can be separated and elute in different fractions.

[0084] FIG. 15 shows that lanthipeptides from APC 3675 semi-purified by RP-HPLC display antimicrobial activity and synergy in WDA against the indicator organism L. delbrueckii ssp. bulgaricus LMG 6901. FIG. 15A shows that no antimicrobial activity is detected in WDAs when α and β peptides are separate. FIG. 15B demonstrates that while homicin is a three-component lantibiotic, two of the three components (the alpha peptide and either one of the beta peptides) are sufficient to obtain antimicrobial activity.

[0085] FIG. 16 shows antimicrobial activity observed in pH neutralised, cell free supernatant against Strep. agalactiae from Lactococcus lactis NZ9700 (Nisin A), Staphylococcus hominis APC3675 (Hominis) and Bacillus paralicheniformis APC1576 (Formicin).

### DETAILED DESCRIPTION OF THE INVENTION

[0086] The two-component lantibiotic of the invention can be formed from precursor peptides (66-amino-acid α-peptide (SEQ ID No. 31), 54-amino-acid β-peptides, hom11 (SEQ ID No. 32) and/or homβ2 (SEQ ID No. 33)) that are ribosomally or artificially synthesised. The α-peptide may comprise a lanthionine bridge between Ser-11 and Cys-21. Additionally or alternatively, the α-peptide may comprise methyllanthionine bridges between one or more of Thr-22 and Cys-27, Thr-24 and Cys-30, Thr-32 and Cys-35, and Thr-34 and Cys-37. Ser-9 may be dehydrated to its respective Dha residue. Ser-28 may remain unaltered (FIGS. 4 and 6). The first β peptide may comprise bridges between Thr-26 and Cys-29, and Ser-31 and Cys-36. This would result in Ser-15, Thr-16, and Thr-21 being dehydrated to their respective Dha and Dhb residues, whilst Thr-18 and Ser-27 remain unaltered (FIGS. 4 and 6). The second β peptide may comprise bridges between Ser-13 and Cys-17, Thr-26 and Cys-29, and Ser-31 and Cys-36. This would result in Thr-4, Thr-7 and Thr-21 being dehydrated to their respective Dha and Dhb residues, whilst Ser-27 would remain unaltered (FIGS. 4 and 6).

[0087] In relation to sequences provided by the invention, sequence identity may be determined using a suitable mathematical algorithm. Computer implementations of such mathematical algorithms can be utilized for comparison of sequences to determine sequence identity. Such implementations include, but are not limited to, CLUSTAL in the PC/Gene program (available from Intelligenetics, Mountain View, California), the ALIGN program (Version 2.0) and GAP, BESTFIT, BLAST, FASTA and TFASTA in the Wisconsin Genetics Software Package, Version 8 (available from Genetics Computer Group (GCG), 575 Science Drive,

[0088] Madison, Wisconsin, USA)). Suitably alignments using these programs may be performed using the default parameters.

[0089] As used herein, “sequence identity” or “identity” in the context of two nucleotide or polypeptide sequences makes reference to a specified percentage of residues in the two sequences that are identical when aligned for maximum correspondence over a specified comparison window, as measured by sequence comparison algorithms or by visual inspection. Suitably, a specified comparison window is selected from a sequence encoding or representing at least 20, at least 25, at least 30, at least 40, at least 50, at least 75, at least 80, at least 85, at least 90, at least 95, at least 100, at least 105, at least 110, at least 115, at least 120, at least 121, at least 122, at least 123, at least 150, at least 200, at least 250 or most preferably all of the amino acids of a specified polypeptide being aligned. In certain embodiments, the specified comparison window is all of the residues of the sequences. When percentage of sequence identity is used in reference to proteins it will be understood by those of skill in the art that residue positions which are not identical often differ by conservative amino acid substitutions, i.e. wherein amino acids are substituted with amino acids which have similar chemical properties to those amino acids which are replaced. The percent sequence identity may be adjusted upwards to correct for the conservative nature of a substitution.

[0090] Amino acids may be grouped according to the properties of their side chains, for examples as follows: (1) non-polar: Ala (A), Val (V), Leu (L), Ile (I), Pro (P), Phe (F), Trp (W), Met (M); (2) uncharged polar: Gly (G), Ser (S), Thr (T), Cys (C), Tyr (Y), Asn (N), Gln (Q); (3) acidic: Asp (D), Glu (E); and (4) basic: Lys (K), Arg (R), His(H). Alternatively, naturally occurring residues may be divided into groups based on common side-chain properties, for example: (1) hydrophobic: Norleucine, Met, Ala, Val, Leu, Ile; (2) neutral hydrophilic: Cys, Ser, Thr, Asn, Gln; (3) acidic: Asp, Glu; (4) basic: His, Lys, Arg; (5) residues that influence chain orientation: Gly, Pro; and (6) aromatic: Trp, Tyr, Phe. Conservative substitutions entail exchanging a member of one of these classes for another member of the same class, that is an amino acid residue with side chains having similar biochemical properties to the amino acid residue being substituted. Preferably when the amino acid sequences of the invention are modified by way of conservative substitution of any of the amino acid residues contained therein, these changes have no effect on the functional activity of the resulting polypeptide when compared to the unmodified polypeptide. The effect (if any) on function of a change in an amino acid residue may be easily assessed by a person skilled in the art, for example, by generating a mutation library, screening for changes in function and sequencing the mutants.

[0091] Hybridisation refers to the binding, duplexing or hybridizing of a molecule only to a particular nucleotide sequence under stringent conditions when that sequence is present in a complex mixture (e.g., total cellular) DNA or RNA. Stringent hybridisation occurs when a nucleic acid binds the target nucleic acid with minimal background. Typically, to achieve stringent hybridisation, temperatures of around 1° C. to about 20° C., more preferably 5° C. to about 20° C. below the Tm (melting temperature at which half the molecules dissociate from their partner) are used. However, it is further defined by ionic strength and pH of the solution.

[0092] The stringent conditions may be selected from highly stringent conditions, medium stringent conditions, stringent conditions and low stringent conditions. An example of highly stringent wash conditions is 0.15 M NaCl at 72 C for about 15 minutes. An example of a stringent wash condition is a 0.2X SSC wash at 65° C. for 15 minutes (see, Sambrook and Russell, infra, for a description of SSC buffer). Often, a high stringency wash is preceded by a low stringency wash to remove background probe signal. An example of a medium stringency wash for a duplex of, for example, more than 100 nucleotides, is 1X SSC at 45° C. for 15 minutes. An example of a low stringency wash for a duplex of, for example, more than 100 nucleotides, is 4-6X SSC at 40° C. for 15 minutes. For short probes (for example about 10 to 50 nucleotides), stringent conditions typically involve salt concentrations of less than about 1.5 M, more preferably about 0.01 to 1.0 M, Na ion concentration (or other salts) at pH 7.0 to 8.3, and the temperature is typically at least about 30° C. and at least about 60° C. for long probes (for example, >50 nucleotides).

[0093] Modifications to the nucleic acids of the present invention are also contemplated as long as the essential structure and function of the peptide or polypeptide encoded by the nucleic acids are maintained. Nucleotide sequences may be codon-optimised or otherwise modified to increase the efficiency of expression of the polypeptides.

[0094] Staphylococcus hominis is a coagulase-negative member of the bacterial genus Staphylococcus, consisting of Gram-positive, spherical cells in clusters. Colonies of S. hominis are small, usually 1-2 mm in diameter after 24 hours′ incubation at 35° C., and white or tan in colour.

[0095] The S. hominis strains were deposited with NCIMB Ltd, Ferguson Building, Craibstone Estate, Bucksburn, Aberdeen, AB21 9YA, Scotland, UK by Teagasc, Moorepark, Fermoy, Co. Cork, Ireland on 7 Feb. 2019 and assigned the accession numbers NCIMB 43358 (APC 3675), 43356 (APC 2924) and 43357 (APC 2925).

[0096] It is understood that the strain of the present invention is not limited to the deposited strain since mutants and variants of the strain, for example, cell fusion strains or recombinant bacteria strains, may also be used in the process of the invention. The term “mutant” is understood herein to refer to a microorganism which is derived from the deposited strain by one or more mutations. The mutant should retain the desired anti-microbial activity of the deposited strain or have improved anti-microbial activity over that of the deposited strain. These mutants can be related bacteria isolates that have either arisen spontaneously or under selection conditions designed to isolate the mutants. For example, commercial kits are available that generate random mutations following which all generated mutants can be screened for anti-microbial activity. The term “variant” is understood herein to refer to a microorganism which comprises the anti-microbial activity of the deposited strain. The variant should retain the desired anti-microbial activity of the deposited strain or have improved anti-microbial activity over that of the deposited strain. These variants can be related bacteria isolates that have either arisen spontaneously or under selection conditions designed to isolate the variants. The variants can also be recombinant bacteria which express the two-component lantibiotic or a variant thereof and which can be constructed using genetic engineering methods which would be well known to those skilled in the art. All generated variants may be easily screened for anti-microbial activity.

[0097] In certain embodiments, the deposited strain is manipulated using genetic engineering methods such that genes responsible for antibiotic resistance are not expressed. For example, strain APC 3675 may be manipulated such that genes responsible for beta-lactam resistance, macrolide resistance, streptogramin A resistance and tetracycline resistance are not expressed.

[0098] In certain embodiments, the bacterial infection is infection by a gram positive bacteria. In certain embodiments, the bacterial infection is infection by bacteria selected from one or more of the group consisting of streptococci, staphylococci and lactobacilli species. In certain embodiments, the streptococci species is selected from one or more of the group consisting of Streptococcus agalactiae, Streptococcus bovis and Streptococcus dysgalactiae. In certain embodiments, the lactobacilli species is selected from one or more of the group consisting of Lactobacillus farraginis, Lactobacillus delbrueckii subsp. Bulgaricus.

[0099] In certain embodiments, the streptococci species is Streptococcus agalactiae. Accordingly, the invention extends to the treatment or prevention of infection by Group B Streptococcus. The subject in need of treatment may be a pregnant female or an infant. The two-component lantibiotic or the strain of the invention may be administered prophylactically to prevent GBS colonisation in a pregnant female and/or an infant or may be administered to treat GBS infection in a pregnant female and/or an infant. The administration of Homicin may have potential as a prophylactic to limit GBS vaginal colonisation during pregnancy and thus prevent mother-infant transmission of this infectious organism which can cause significant morbidity and mortality in infected infants.

[0100] In certain embodiments, the bacterial infection is infection by a skin pathogen, such as Corynebacterium xerosis. Accordingly, the invention extends to the treatment or prevention of pneumonia, sepsis and conjunctivitis associated with skin pathogens, such as Corynebacterium xerosis. The subject in need of treatment may be an immunocompromised individual.

[0101] Anti-microbial activity may be assayed using methods which would be well known to persons skilled in the art, for example, spot assays and well diffusion assays as described in the below examples.

[0102] Treatment (i.e. the two-component lantibiotic or the strain) may be combined with one or more standard treatments for the disease or condition in question. The treatment may be administered alone or may be administered as a pharmaceutical composition which will generally comprise a suitable pharmaceutically acceptable excipient, diluent or carrier. The pharmaceutically acceptable excipient, diluent or carrier may be selected depending on the intended route of administration. Examples of suitable pharmaceutical carriers include water, glycerol and ethanol. The two-component lantibiotic of the invention may be administered as a combined peptide formulation.

[0103] The treatment may be administered to a subject in need of treatment via any suitable route. In particular, the treatment may be administered orally or topically as it is capable of crossing the blood-brain barrier. The treatment may also be administered parenterally by injection or infusion. Examples of preferred routes for parenteral administration include, but are not limited to, intravenous, intracardial, intraarterial, intraperitoneal, intramuscular, intracavity, subcutaneous, transmucosal, inhalation and transdermal. Routes of administration may further include topical and enteral, for example, mucosal (including pulmonary), oral, nasal and rectal. The treatment may also be administered via nanoparticles, microspheres, liposomes, other microparticulate delivery systems or sustained release formulations placed in certain tissues including blood. Typically, the two-component lantibiotic of the invention may be provided in the form of a vaginal suppository, for example, for administration when used as an antimicrobial against Group B Streptococcus, or as a skin cream, for example, when used against skin pathogens, such as Corynebacterium xerosis.

[0104] The treatment is typically administered to a subject in a “therapeutically effective amount”, this being an amount sufficient to show benefit to the subject to whom the treatment is administered. The actual dose administered, and rate and time-course of administration, will depend on, and can be determined with due reference to, the nature and severity of the condition which is being treated, as well as factors such as the age, sex and weight of the subject being treated, as well as the route of administration. Further due consideration should be given to the properties of the treatment, for example, its in-vivo plasma life and concentration in the formulation, as well as the route, site and rate of delivery. Prescription of treatment, e.g. decisions on dosage, etc., is ultimately within the responsibility and at the discretion of general practitioners and other medical doctors, and typically takes account of the disorder to be treated, the condition of the individual patient, the site of delivery, the method of administration and other factors known to practitioners.

[0105] Dosage regimens can include a single administration, or multiple administrative doses. The treatment can further be administered simultaneously, sequentially or separately with other therapeutics and medicaments which are used for the treatment of the disease or condition for which the treatment is being administered.

### Definitions

[0106] Unless otherwise defined, all technical and scientific terms used herein have the meaning commonly understood by a person who is skilled in the art in the field of the present invention.

[0107] Typically, the terms “subject” and “patient” are used interchangeably herein. The subject is typically a mammal, more typically a human.

[0108] The term “treatment” as used herein and associated terms such as “treat” and “treating” means the reduction or inhibition of the progression, severity and/or duration of the bacterial infection or at least one symptom thereof. The term ‘treatment’ therefore refers to any regimen that can benefit a subject. Treatment may include curative, alleviative or prophylactic effects.

[0109] A peptide, polypeptide, protein, bacteria or nucleic acid molecule of the invention may be provided in an “isolated” form. The term “isolated” as used herein means that the substance is provided in a form that differs from its naturally occurring environment. It may be used to refer to an in vitro preparation, isolation and/or purification of a peptide, polypeptide, protein, bacteria or nucleic acid molecule of the invention, such that it is not associated with in vivo substances or is substantially purified from in vivo substances or is present outside its naturally occurring environment.

[0110] As used herein, an “isolated lantibiotic” is one which has been identified and separated and/or recovered from a component of its natural environment. “Synthetic lantibiotics” or “recombinant lantibiotics” are generally generated using recombinant technology or using peptide synthetic techniques known to those of skill in the art.

[0111] An “isolated” bacteria is also one which has been identified and separated and/or recovered from a component of its natural environment.

[0112] As used herein, a polypeptide can be considered to be “derived from” a strain if the polypeptide originates directly or indirectly from the strain. The polypeptide may be encoded by a part of the genome of the strain and may therefore be obtainable directly from culturing the strain, including for example being expressed in the strain, for example in microbial whole cells, being present in the cytosol thereof, being present in a cell culture thereof or being present in a cell lysate thereof. The polypeptide may also be synthetically prepared from a gene which is endogenous to the strain of the invention following isolation of the gene from the strain and sequencing of the gene. For example, the polypeptide may be synthetically prepared, and/or be obtained using recombinant DNA technology, such as from a genetically engineered plasmid/host cell system in which the plasmid includes a nucleic acid polymer which encodes the polypeptide.

[0113] As used herein the terms “nucleic acid” or “nucleotide sequence” includes genomic DNA, cDNA or RNA.

[0114] The phrase “consists essentially of” or “consisting essentially of” as used herein means that a polypeptide or nucleotide sequence may have additional features or elements beyond those described provided that such additional features or elements do not materially affect the ability of the polypeptide to metabolise nitriles. For example, a polypeptide consisting essentially of a specified sequence may contain one, two or three additional, deleted or substituted amino acids, at either end or at both ends of the sequence provided that these amino acids do not interfere with its function. Similarly, a polypeptide of the invention may be chemically modified with one or more functional groups provided that such functional groups do not interfere with its function.

[0115] The terms “polypeptide”, “peptide”, or “protein” are used interchangeably herein to designate a linear series of amino acid residues connected one to the other by peptide bonds between the alpha-amino and carboxy groups of adjacent residues. The amino acid residues are usually in the natural “L” isomeric form. However, residues in the “D” isomeric form can be substituted for any L-amino acid residue, as long as the desired functional property is retained by the polypeptide.

[0116] A peptide, polypeptide, protein, bacteria or nucleic acid molecule of the invention may be provided in a “purified” form. As used herein, the term “purified” refers to a degree of separation that is higher than isolated. A nucleic acid or polypeptide of the presently disclosed subject matter is purified if it is substantially free of cellular material, viral material, or culture medium when produced by recombinant DNA techniques, or chemical precursors or other chemicals when chemically synthesised.

[0117] The words “comprises/comprising” and the words “having/including” when used herein with reference to the present invention are used to specify the presence of stated features, integers, steps or components, but do not preclude the presence or addition of one or more other features, integers, steps, components or groups thereof.

[0118] As used herein, terms such as “a”, “an” and “the” include singular and plural referents unless the context clearly demands otherwise.

[0119] It is appreciated that certain features of the invention, which are, for clarity, described in the context of separate embodiments, may also be provided in combination in a single embodiment. Conversely, various features of the invention which are, for brevity, described in the context of a single embodiment, may also be provided separately or in any suitable sub-combination.

### EXAMPLES

### Materials and Methods

### Patient Recruitment and Sampling

[0120] Approval for collection of the vaginal swabs was obtained by the Cork Research Ethics Committee of the Cork Teaching Hospitals, and informed consent was provided by each of the women taking part in the study. In total 130 women were recruited at the colposcopy clinic St. Finbarr's Hospital, Cork, of which 125 swabs were collected (5 swabs became unobtainable at the time of collection). A high vaginal swab was obtained from each woman who underwent a colposcopy at the clinic, with the exception of women on antibiotics or probiotic treatment. The sample of vaginal fluid was collected using a Dacron swab (Medical Packaging Swab-Pak™, Camarillo, Calif., USA). The swabs were stored in a cool box at 4° C. and collected from the clinic within 24 hours. Skin swabs were obtained from healthy volunteers in a study by O'Sullivan et al., 2018. In total, 20 skin swabs were collected from 13 females and 7 males. Approval to obtain skin swabs for this study was acquired from the Cork Clinical Research Ethics Committee under Protocol number APC071 and informed consent was granted by all 20 volunteers.

Isolation of Bacteria from Vaginal and Skin Swabs

[0121] Vaginal swabs were incubated aerobically at 37° C. for 24 hours (h) in 5 mL of GBS selective enrichment broth. Enrichment broth contained the following ingredients: Todd Hewitt broth (30 g/L), yeast extract (10 g/L) and nalidix acid (15 mg/L). After incubation, 1 mL of the enrichment broth was serially diluted in maximum recovery diluents (MRD; Oxoid Ltd., Basingstoke, Hampshire, UK) and plated on brain heart infusion (BHI) agar (Merck); incubated aerobically at 37° C. for 24 h. Bacteria were isolated from skin swabs as described by O'Sullivan et al., 2018. riefly, each swab (Sarstedt swabs Amies, PS, Viscose) was dipped in sterile saline prior to swabbing the body area. Swabs were vortexed in 2 mL of MRD (Oxoid), serial dilutions were carried out in MRD (tenfold dilutions) and 100 μL of the dilutions were spread plated onto Mannitol Salt Agar (MSA; Oxoid Ltd.) and Brain Heart Infusion (BHI) agar (Merck, Darmstadt, Germany) and incubated aerobically at 37° C. for 48h.

### Identification of Antimicrobial Producing Isolates

[0122] The antimicrobial producing isolates were identified by 16S rRNA sequencing using universal primers, Uni-F (5′-AGAGTTTGATCCTGGCTCAGG-3′) (SEQ ID No. 27) and UniR (5′-ACGGCAACCTTGTTACGAGT-3′) (SEQ ID No. 28). PCR product was cleaned using the GenElute™ PCR Clean-Up Kit (Sigma) and subsequent PCR product was sequenced by Genewiz (Essex, UK). For species verification, degenerate primers for amplification of the dnaJ gene (forward primer: 5′-GCCAAAAGAGACTATTATGA-3′ (SEQ ID No. 29) and reverse primer: 5′-ATTGYTTACCYGTTTGTGTACC-3′) (SEQ ID No. 30) were employed for the PCR reactions using conditions outlined by (Shah et al., 2007).

### Detection of Antimicrobial Activity

[0123] A) Spot assays: To detect antimicrobial activity from the vaginal isolates, colonies isolated on BHI agar (from vaginal swabs), were overlaid with ‘sloppy’ BHI agar (0.75% agar) inoculated with 0.5% of S. agalactiae APC 1055. For vaginal isolates, Streptococcus agalactiae APC 1055 was used as an indicator microorganism for the isolation of bacteria with antimicrobial activity against GBS. Of the 125 vaginal swabs, only one swab was found to contain isolates which displayed a zone of inhibition against the indicator organism. Subsequently, the identified antimicrobial producing isolate, S. hominis APC 3675, was further characterised and tested against a range of indicator organisms (Table 1). This involved initially spotting 10 μL of the S. hominis APC 3675 culture onto BHI agar plates, which were incubated overnight and subsequently overlaid with 10 mL of the appropriate agar seeded at 0.5% with the indicator organism (Table 1). A similar approach was adopted to detect antimicrobial activity from skin isolates (O'Sullivan et al., 2018). Lactobacillus delbrueckii ssp. bulgaricus LMG 6901 was used as the primary indicator microorganism to detect antimicrobial activity from skin isolates and colonies of different morphology were isolated from BHI and MSA plates. Skin isolates obtained from BHI plates were overlaid with L. delbrueckii ssp. bulgaricus and skin isolates obtained from MSA plates were overlaid with either Listeria innocua DPC 3572 or Methicillin-Resistant Staphylococcus aureus (MRSA) DPC 5645. S. hominis skin isolates APC 2924 and APC 2925 were isolated from the toe web-space area and were isolated from BHI plates.

[0124] B) Well diffusion assays (WDA): Following spot assays, WDA were then carried out on cultures that produced a zone in the spot assays. Cell free supernatants (CFS) were obtained by centrifuging 10 mL overnight cultures (in Sorvall Legend RT) at 4000xg for 20 minutes (Ryan, Rea, Hill, & Ross, 1996). 50p1 of neutralised CFS was obtained from each of the three S. hominis strains and used in WDA containing 0.25% inoculum of L. delbrueckii ssp. bulgaricus LMG 6901 and GBS among other targets (Table 1).

[0125] Preparation of S. hominis APC 3675, APC 2924 and APC 2925 for peptide purification 5 mL volumes of S. hominis APC 3675, S. hominis APC 2924 and S. hominis APC 2925 were incubated overnight and used to inoculate 20 mL (1% inoculum) of BHI broth, incubated by shaking aerobically at 180 rpm for 8 hours at 37° C. Subsequently, 400 mL of BHI XAD was inoculated. BHI XAD is prepared by passing BHI media through a column containing XAD beads prior to autoclaving. Cells were separated from supernatant and the cell pellet mixed with approximately 100 mL 70% propan-2-ol 0.1% TFA (IPA). The suspension was stirred for 3 hours at room temperature and re-centrifuged. See FIG. 12 for image of the cell suspensions showing differences in cell preparation between the cultures.

Purification of Antimicrobial Peptides Produced by S. hominis APC 3675, APC 2924 and APC 2925

[0126] Supernatant was collected from each of the three cultures and IPA evaporated. The resulting samples were applied to a 12 mL 2 g C18 SPE column (Phenomenex, Cheshire, UK) pre-equilibrated with methanol and water. The column was washed with 15 mL 30% ethanol (30E) and antimicrobial activity eluted with 20 mL IPA. Eluents were assayed on a Lactococcus lactis HP indicator plate to show that activity was retained by the column.

### HPLC Analysis of Cell Extracts

[0127] Samples were concentrated and applied to a semi preparative Proteo Jupiter (10×250 mm, 90 Å, 4μ) RP-HPLC column (Phenomenex, Cheshire, UK) running a 25-45% acetonitrile 0.1% TFA where buffer B is 100% acetonitrile 0.1% TFA. Eluent was monitored at 214 nm and fractions were collected at 1 minute intervals. Fractions were assayed on Lactococcus lactis HP indicator plates.

### Mass Spectrometry (MS)

[0128] MALDI-TOF MS (Axima TOF2 MALDI-TOF MS, Shimadzu Biotech) was performed to determine the molecular mass of the antimicrobial peptides. The masses detected were compared to those identified in the bacteriocin operon of S. hominis APC 3675, APC 2924 and APC 2925 (described below). For partially purified fractions an additional run on the RP-HPLC column was performed on a 30-35% acetonitrile gradient where buffer B is 90% acetonitrile 0.1% TFA. Eluent was monitored at 214 nm and fractions were collected at 1-minute intervals. Active fractions were confirmed by agar well diffusion assay and lyophilised for further peptide stability and minimal inhibitory concentration (MIC) assays.

### Colony Mass Spectrometry

[0129] Colonies from three S. hominis strains APC 3675, APC 2924 and APC 2925 were mixed with 50 μL propan-2-ol 0.1% TFA, vortexed three times and centrifuged at 16000xg for 30 seconds. MALDI TOF mass spectrometry was performed on the CFS using an Axima TOF2 MALDI TOF mass spectrometer (Shimadzu Biotech, Manchester, UK). An aliquot (0.5 μL) of matrix solution (α-cyano 4-hydroxy cinnamic acid, 10 mg ml-1 in acetonitrile-0.1% (v/v) trifluoroacetic acid) was deposited onto the target and left for 10 seconds before being removed. The residual solution was allowed to air-dry and 0.5 μL of sample solution was deposited onto the pre-coated sample spot; 0.5 μL of matrix solution was added to the deposited sample and allowed to air-dry. The sample was then analysed in positive-ion linear mode and peptide masses compared to the bacteriocin database, ‘Bactibase’ to identify putative bacteriocins.

### Peptide Stability

[0130] To confirm if the antimicrobial activity was due to the production of a bacteriocin, the partially purified peptides obtained from each of the three S. hominis isolates were treated with proteinase K and a-chymotrypsin (10 mg/mL, Sigma-Aldrich). The peptide mixture containing both a and _{R} peptides was incubated at 37° C. for 3 h with each protease, followed by treatment at 100° C. for 15-20 min to inactivate these proteases. The sample was then tested for antimicrobial activity in well diffusion assay against the indicator S. agalactiae APC 1055 and L. delbrueckii ssp. bulgaricus DPC 6901.

### Minimal Inhibitory Concentration (MIC) Assay

[0131] After partial purification of the identified lantipeptides, fractions containing a and _{R} peptides were lyophilized and diluted separately in sterile water to a concentration of 1 mM. The peptide preparation of APC 3675 was finally diluted in BHI broth to give the desired starting concentrations (in a 1:1 ratio), and two-fold serial dilutions were performed in 96-well microtitre plates containing approximately 1×105 cfu/mL of S. agalactiae APC 1055. MIC readings were taken in triplicate after 18 h incubation at 37° C. and MIC was recorded as the lowest concentration of the antimicrobial at which there was no visible growth of the indicator organism.

### Draft Genome Sequencing

[0132] Genomic DNA was extracted using the GenElute bacterial genomic kit (Sigma-Aldrich) and the Nextera XT DNA kit (Illumina) was used for library preparation. The DNA was quantified using a Qubit 3.0 fluorometer. Sequencing was performed using Illumina's MiSeq platform using paired-end 2×300 base pair reads in the Teagasc Sequencing Centre, Teagasc Food Research Centre Moorepark. Reads for APC 3675 were assembled de novo, using SPAdes (version 3.10.0), resulting in 152 total contigs, including 39 large contigs (>500 bp). ORFs were identified and annotated using Prokka (version 1.11). Further manual annotation was implemented with ARTEMIS, and the BLAST Ring Image Generator (BRIG) was used to visually compare the contig containing the bacteriocin operon in each of the three S. hominis draft genomes (FIG. 7).

### In Silico Validation of Bacteriocin Operon

[0133] To identify a potential bacteriocin cassette in the three draft genomes of interest, Bagel4 was used (Van Heel et al., 2018). Bagel4 (http://bage14.molgenrug.nl/), also known as the BActeriocin GEnome mining tool (BAGEL), is an online tool used for the identification of genes encoding bacteriocins and RiPPs. Lanthipeptides, sactipeptides, glycocins and others can be detected using this tool. In addition, antiSMASH3.0 was used to detect genes encoding biosynthetic pathways responsible for the production of secondary metabolites, such as lantipeptides (Weber T et al., 2015). To perform multiple sequence alignments of nucleotide and amino acid residues, Clustal Omega was used in conjunction with the desktop application Jalview-2 (Waterhouse et al., 2009, Sievers et al., 2011). To identify plasmid constructs within the annotated contigs, the online tool PlasmidFinder-1.3 was used (Carattoli et al., 2014) and to identify virulence genes and genes responsible for antimicrobial resistance, VirulenceFinder-1.5 and ResFinder-3.0 were used, respectively (Joensen et al., 2014, Zankari et al., 2012).

### Pulsed Field Gel Electrophoresis (PFGE)

[0134] To compare the genetic fingerprints of the S. hominis strains, APC 3675, APC 2924 and APC 2925, PFGE was carried out on all three strains following the method described by Bannerman et al. with minor deviations as described by O′Sullivan et al., 2018. To optimise the procedure, additional washing steps were carried out for 20 minutes (mins) with TE 10/0.1 buffer, followed by 10 mins in buffer solution and digestion with Sma1 enzyme.

### Separating Beta Peptides (β1 and β2) of APC 3675

[0135] Co-eluting beta peptides (from semi prep HPLC acetonitrile gradient) were run on an analytical Proteo Jupiter HPLC column (4.6'250 mm, 4p, 90 Å), where buffer A=0.1% TFA, and buffer B=100% propan-2-ol 0.1% TFA, and run on a 25-36% gradient of propan-2-ol 0.0% TFA over 45 minutes, with a flow rate of 0.3 mL/min. Fractions were collected at 1 minute intervals and assayed on L. delbrueckii ssp. bulgaricus indicator plates to decipher active fractions and to determine if the beta peptides (β1 and β2) could be separated (FIG. 14).

### Results

[0136] Isolation of S. hominis APC 3675

[0137] S. hominis APC 3675 was isolated from the vaginal microbiota of a healthy female attending a colposcopy clinic in Cork, Ireland. In an initial screen for bacteriocin producers, the strain was found to inhibit S. agalactiae APC1055 in an overlay assay (FIG. 1). Interestingly, no zone of inhibition was detected in CFS, initially indicating that the antimicrobial substance is cell associated. However, on shaking antimicrobial activity was observed in the CFS.

[0138] The three homicin producers (APC 3675, APC 2924 and APC 2925) displayed inhibitory activity with a 2-3 mm zone of inhibition against twelve of 33 strains tested in spot assays (see Table 1). S. hominis isolates were subsequently screened by WDA to determine the spectrum of inhibition in CFS (Table 1). Overall, homicin exhibited a relatively narrow spectrum of activity inhibiting streptococci, staphylococci and lactobacilli species, with desired antimicrobial activity against S. agalactiae spp.

TABLE 1
Growth conditions of indicator strains and inhibition spectrum of the three S. hominis
APC 3675, APC 2924 and APC 2925 following spot plate and well diffusion assays.

| Indicator strain | strain number | Temp.(° C.) | conditions | media | zone |
|---|---|---|---|---|---|
| Bacillus subtilis | DPC 3344 | 37 | Aerobic | BHI | + |
| Bacillus subtilis | LMG | 37 | Aerobic | BHI | − |
| Bacillus cereus | DPC 6085 | 37 | Aerobic | BHI | − |
| Bacillus paralicheniformis | APC1576 | 37 | Aerobic | BHI | − |
| Bacillus licheniformis | DSM 13 | 37 | Aerobic | BHI | − |
| Corynebacterium xerosis | DPC5629 | 37 | Aerobic | BHI | ++ |
| Cutibacterium acnes | LMG 16711 | 37 | Anaerobic | SLA | − |
| Clostridium difficile | ATCC 1382 | 37 | Aerobic | BHI | − |
| Enterococcus faecium | DPC 4898 | 37 | Anaerobic | MRS | − |
| Enterococcus mundtii | LMG 10748 | 37 | Anaerobic | MRS | − |
| Lactobacillus delbrueckii | LMG 6901 | 37 | Anaerobic | MRS | ++ |
| subsp. Bulgaricus | | | | | |
| Lactobacillus farraginis | DSM 18382 | 30 | Anaerobic | MRS | ++ |
| Lactobacillus fermentum | APC 2582 | 37 | Anaerobic | MRS | + |
| Lactobacillus nodensis | DSM 19682 | 30 | Anaerobic | MRS | + |
| Lactobacillus plantarum | DSM 13278 | 37 | Anaerobic | MRS | − |
| Lactococcus lactis | APC 706 | 30 | Aerobic | GM17 | − |
| Lactococcus lactis | DPC 3147 | 30 | Aerobic | GM17 | − |
| Listeria monocytogenes | 1416 | 37 | Aerobic | BHI | + |
| Listeria monocytogenes | DPC 6893 | 37 | Aerobic | BHI | |
| MRSA | DPC 5645 | 37 | Aerobic | BHI | − |
| Pseudomonas aeruginosa | APC 2064 | 37 | Aerobic | BHI | − |
| Salmonella typhimurium | LT2 | 37 | Aerobic | BHI | − |
| Staphylococcus aureus | C55 | 37 | Aerobic | BHI | − |
| Staphylococcus aureus | R963 | 37 | Aerobic | BHI | − |
| Staphylococcus epidermidis | DPC 5990 | 37 | Aerobic | BHI | − |
| Staphylococcus simulans | APC 3482 | 37 | Aerobic | BHI | − |
| Streptococcus agalactiae | APC 1055 | 37 | Aerobic | BHI | ++ |
| Streptococcus agalactiae | ATCC 13813 | 37 | Aerobic | BHI | ++ |
| Streptococcus bovis | DPC 6491 | 37 | Aerobic | BHI | ++ |
| Streptococcus dysgalactiae | APC 3484 | 37 | Aerobic | BHI | ++ |
| Streptococcus hyointestinalis | DPC 6484 | 37 | Anaerobic | GM17 | − |
| Streptococcus uberis | DPC 5344 | 37 | Aerobic | BHI | − |

MRS, de Man, Rogosa and Sharpe; BHI, brain-heart infusion. −, No activity; +, 0.5-1.5 mm inhibition zone; ++, 2-3.5 mm inhibition zone.

### Purified Antimicrobial Peptides

[0139] Two active fractions were obtained after purification by RP-HPLC analysis. MALDI-TOF MS identified a molecular mass of 3396.4 Da in the first fraction. However, in the second fraction two molecular masses of 3300.5 Da and 3014.9 Da were identified. It was not immediately apparent which masses were responsible for the bacteriocin activity in this second partially purified fraction as it was not possible to separate the two peptides of similar mass. However, three core peptides of interest were identified within the bacteriocin operon after genome sequencing of S. hominis APC 3675, APC 2924 and APC 2925. Subsequently these three peptides were suggested to be responsible for the antimicrobial activity displayed against S. agalactiae APC1055 and Lb. delbrueckii subsp. bulgaricus LMG 6901 (FIGS. 2 and 3).

MIC results and Peptide Stability

[0140] Results from the MIC assay performed against S. agalactiae APC 1055 revealed that homicin α and β peptides, at a 1:1 ratio, had a MIC cut off value of 6.25 pM. In terms of stability, homicin retained antimicrobial activity after treatment at 100° C. for 15 min. The bacteriocin was also found to be susceptible to digestion by α-chymotrypsin and proteinase K, indicating the proteinaceous nature of the bacteriocin.

### Identification of Plasmid Encoded, Two-Component Lantibiotic Operon

[0141] Interestingly, after analysis of the putative lantibiotic operon, three putative lantibiotic encoding structural genes were identified; one homA1 structural α peptide (SEQ ID No. 1 and 2) and two homA2 structural β-peptides (SEQ ID No. 3 and 4 and SEQ ID No. 5 and 6 respectively) (Table 2). This contig containing the bacteriocin operon spans approximately 43 kb.

TABLE 2
Amino acid sequences for three structural peptides within the two-component
lantibiotic operon. Protease cleavage of the prepeptide was predicted using Clustal Omega
alignments to compare against known structural peptides and the RiPP database. The mass
of the structural peptide was compared to results from MALDI-TOF MS analysis and the
subsequent numbers of dehydration reactions were calculated.

| | | | Mass of | MALDI-TOF | No. of |
|---|---|---|---|---|---|
| Peptide | Full Sequence | Structural peptide (SP) | SP (Da) | MS (Da) | dehydrations |
| HomA1 | MSNKDLELFNTAGDLIQELKDGDLNIHLYGESEIR- | KKSFSQKTGNDGKHCTITWECS | 3522.058 | 3396 | 7 |
| | KKSFSQKTGNDGKHCTITWECSICPTKTCWC | ICPTKTCWC | | | |
| Homβ1.0 | LKQNSRITLDELNKITMGTSEVR- | KGKGGGFSTVTVVTPIVPTSKC | 3104.7 | 3014 | 5 |
| | KGKGGGFSTVTVVTPIVPTSKCASIVKPCNK | ASIVKPCNK | | | |
| Homβ2.0 | MTKITKDDLKKITENRIEAR- | THPTVVPVSAAVCGVATKLVPT | 3407.1 | 3300 | 6 |
| | THPTVVPVSAAVCGVATKLVPTSKCASIVKPCNK | SKCASIVKPCNK | | | |

[0142] Due to the extent of nucleotide coverage and the presence of plasmid encoding elements, the lantibiotic operon is thought to be plasmid encoded. The following genetic elements suggest that the novel lantibiotic is plasmid encoded: 1) at the beginning of the DNA sequence a replication initiation protein (repA) was detected with 94% identity to S. hominis repA, 2) a plasmid mobilization relaxosome protein (MobC) was detected with 80% identity to MobC, 3) a plasmid recombination protein (PRP) was detected with 99% identity to many PRPs in Staphylococcus spp. and 4) a replication initiation protein (repA) was detected encoding a putative DNA relaxase NicK with 99% identity to NicK found in Staphylococcus aureus.

[0143] Within the bacteriocin encoding segment of the plasmid, a two-component lantibiotic was identified. A 66-amino-acid putative a-peptide was first identified, followed by two similar 54-amino-acid β-peptides, homβ1 and homβ2. These predicted structural β-peptides were found to have 54.8% identity to one another. Initial Bagel4 output of the two-component lantibiotic found the unmodified homicin a peptide be 40% similar to haloduracin α, and the unmodified homicin β peptides to be 30% similar to haloduracin β. However, after prediction of the protease cleavage site in homa (Arg-Lys), the core structural α-peptide was aligned against previously identified α-peptides and the following result was obtained by Clustal Omega-2.1: 40% identity to smbA1, and 38.5% identity to ItnA1, sacA1 and bhtA1 (FIG. 4). Similarly, the two residues resembling the core β-peptides were aligned against those previously identified two-component β-peptides. Homβ1 was found to display 30.7% identity to lichenicidenA2, and homβ2 was found to display 34.8% identity to haloduracin β (FIG. 4).

[0144] Furthermore, Bagel4 identified two lantibiotic modification enzymes in the homicin operon (FIG. 5). The order of the genes in the operon would suggest that ORF M1 (homM1) is the modification enzyme associated with homα, and ORF M2 (homM2) is the modification enzyme associated with homβ1 and homβ2. Amino acid alignment of homM1 and homM2 displayed only 25% identity to one another. The amino acid sequences of homM1 and homM2 were subsequently input to the Blastp suite where the sequences were found to display 38% identity to a LanM modification enzyme in Virgibacillus dokdensis DSW-10, a novel strain isolated from sea water at Dokdo, an island in the East Sea, Korea (Yoon et al., 2005).

[0145] In terms of lanthipeptide immunity, ORF B, ORF C and ORF T were found to encode ABC transporter-related peptides which are likely to be involved in bacteriocin transport and immunity (FIG. 5). ORF B encoded an ABC-2 membrane transporter family (pfam01061), while ORF C displayed 52% identity to the ABC transporter ATP-binding protein in Staphylococcus delphini 8086. This ABC transporter was also found to be part of an ATP-binding cassette domain of the bacitracin-resistance transporter (BcrA), representing ABC transporters involved in peptide antibiotic resistance. ORF T was found to encode an ABC-type multidrug transport system, which displayed 50-53% identity to previously identified ABC transporter ATP-binding proteins within the Staphylococcus species in NCBI (specifically Staphylococcus saprophyticus). Interestingly, located just downstream of the transporter homT, a DnaB domain-containing protein responsible for replication initiation and membrane attachment was identified. ORF R displayed 90% identity to Staph. equorum with a specific hit on BLAST NCBI to polymerase and histidinol phosphatase domain of histidinol phosphate phosphatase. This enzyme plays a role in histidine metabolism; specifically catalysing the penultimate step of the histidine biosynthesis pathway: i.e. the dephosphorylation of histidinol phosphate to histidinol, the direct precursor of histidine (Le Coq, Fillinger and Aymerich, 1999), suggesting it to be a putative regulatory protein for the homicin operon. NCBI BLAST results also revealed ORF R encoded a putative AbiEii toxin, type IV toxin/antitoxin system, responsible for an abortive phage resistance system (pfam: PF08843) (Dy et al., 2014).

[0146] The lantibiotic protease (homP), which cleaves the structural peptides within the lantibiotic operon, was located downstream of the homβ structural peptides (ORF P), which was further analysed to reveal a peptidase S8 family domain. This lantibiotic specific protease is known to cleave the N-terminal leader peptides from lantiobiotics. Further analysis of the peptidase domain revealed a putative subtilisin-like, serine protease (AprE) conserved region encoded within the homP genetic machinery (see pfam00082). The blastp suite found homP to have 40% identity to other Bacillus cereus peptidases on the NCBI database. A gene responsible for the transport of the novel antimicrobial was also identified.

Additional In Silico Results from Draft Genome S. hominis APC 3675

[0147] In addition to a novel lantibiotic operon, a biosynthetic gene cluster was identified with 75% similarity to a prevalent siderophore, staphyloferrin A (Cotton et al., 2009), using antiSMASH (see FIG. 8). Thus, in response to iron limitation the presence of a potential siderophore would benefit the survival of S. hominis strains APC 3675, APC 2924 and APC 2925. No virulence genes were found using VirulenceFinder-1.5. However, ResFinder-3.0 found genes responsible for beta-lactam resistance (blaZ-95.9% identity), macrolide resistance (mph-99.9% identity), streptogramin A resistance (msr-99.0% identity) and tetracycline resistance (tet-99.9% identity). Moreover, PlasmidFinder-1.3 was able to detect a RepC cassette with 100% identity to a staphylococcal shuttle vector. This potential plasmid was 4566bp in length and contained the TetK gene responsible for tetracycline resistance, with 99% similarity to the tetracycline resistance efflux pumps found using the Basic Local Alignment Search Tool (BLAST).

### Homology Between Bacteriocins

[0148] Comparisons of the structural peptides associated with homicin were performed using Clustal Omega-2.1. Previously identified two-component bacteriocins were used to align the structural peptides associated with homicin (FIG. 4). Results indicate that homicin displays a similar degree of homology displayed amongst other bacteriocins. The homology in lanthionine and methyl-lanthionine bridge formation suggests a structural similarity in each of the peptides. Interestingly, the regions of conservation observed at the C-terminus of the β peptides suggest a conserved pattern of lanthionine and methyl-lanthionine bridge formation. However, a much lower degree of conservation was found at the N-terminus of the bacteriocins.

### Bacteriocin Structure Prediction and Analysis

[0149] MALDI-TOF MS analysis of active HPLC fractions led to the identification of molecular masses 3396, 3014 and 3300.5 Da of predicted α, β1 and β2 structural peptides, respectively (FIG. 2). The predicted mass of the a-peptide, based on the amino acid sequence from the draft genome, was 3522.10 Da (Table 2); the difference between the predicted and observed 3396 Da mass correlates with the loss of seven water residues associated with the formation of lanthionine and methyllanthionine bridges and the dehydration of Ser-9.

[0150] To predict the α-peptide structure, Ltna was used as a template. Theoretically the formation of a lanthionine bridge may occur between Ser-11 and Cys-21, whilst methyllanthionine bridges could form between Thr-22 and Cys-27, Thr-24 and Cys-30, Thr-32 and Cys-35, as well as between Thr-34 and Cys-37, whilst Ser-9 is dehydrated to its respective Dha residue and Ser-28 remains unaltered (FIGS. 4 and 6).

[0151] The first β peptide, located downstream to the alpha peptide in the bacteriocin operon, had a predicted mass of 3104.7 Da (homβ1). The predicted mass had a difference of 90 Da from the mass detected by MALDI TOF MS (Table 2). This mass difference corresponds with the prediction of five dehydrations in the peptide. Using the structures of hap and lichβ peptides as templates, the peptide was predicted to form bridges between Thr-26 and Cys-29, and Ser-31 and Cys-36. This would result in Ser-15, Thr-16, and Thr-21 being dehydrated to their respective Dha and Dhb residues, whilst Thr-18 and Ser-27 remain unaltered (FIGS. 4 and 6).

[0152] Finally, the second β peptide located in the bacteriocin operon (homβ2) had a predicted mass of 3407.1 Da, a difference of 107 Da from the 3300 Da mass detected by MALDI-TOF MS (Table 2, FIG. 4). This mass difference corresponds with the prediction of six dehydrations in the peptide. The peptide was predicted to form bridges between Ser-13 and Cys-17, Thr-26 and Cys-29, and Ser-31 and Cys-36. This would result in Thr-4, Thr-7 and Thr-21 being dehydrated to their respective Dha and Dhb residues, whilst Ser-27 would remain unaltered (FIGS. 4 and 6).

Comparison of Three S. hominis Strains

[0153] As the bacteriocin operons of APC 3675, APC 2924 and APC 2925 were identical, the next step was to investigate if there were differences between the three strains. Three approaches were taken—firstly PFGE procedure was carried out to view genetic fingerprint of the strains which revealed differences in pulsotypes of the strains (FIG. 9). Secondly, a comparative table of genes present on the homicin contig was created (FIG. 10). This table highlights what genes were present in one strain that were not present in another.

[0154] Thirdly, colony MS was carried out individually on all three cultures. An extra peak at ˜2370 Da was observed in APC 2924 and APC 2925, but this mass was not present in APC 3675. From these three comparative methods, differences were found between all three strains. However, APC 3675 appears to be the most unique of the three S. hominis strains in this study.

Confirmation that Homicin is a Three-Component Antibiotic

[0155] A chromatogram of the semi-purification of APC 3675 by RP-HPLC demonstrates the beta peptides (β1 and β2) elute in different fractions and thus can be separated (FIG. 14). However, despite being a three-component lantibiotic, only two components, the a peptide and either one of the β peptides, are required for antimicrobial activity (FIG. 15).

### Inhibition of Group B Strep

[0156] Known antimicrobial producing microorganisms were assessed for their ability to inhibit Group B Strep (Streptococcus agalactiae). The following table illustrates the strains which were screened against GBS and their equivalent range of antimicrobial activity (i.e. zone of inhibition) using cell free supernatant.

TABLE 3
Bacteriocin producing isolates assessed for antimicrobial activity against GBS.

| | | Growth conditions | | | | Activity |
|---|---|---|---|---|---|---|
| ID | Species | Temp(° C.) | Atmosphere | Media | Origin | against GBS |
| DPC 6489 | Lactobacillus gasseri | 37° C. | Anaerobic | MRS | Crohn's patient | — |
| DPC 6490 | Streptococcus salivarius (A5) | 37° C. | Aerobic | BHI | Healthy adult | — |
| DPC 6005 | Lactobacillus salivarius | 37° C. | Anaerobic | MRS | Porcine | — |
| DPC 6503 | Lactobacillus reuteri | 37° C. | Anaerobic | MRS | Porcine | — |
| DPC 6488 | Lactobacillus salivarius | 37° C. | Anaerobic | MRS | Infant | — |
| DPC 6487 | Streptococcus salivarius | 37° C. | Aerobic | BHI | Infant | — |
| DPC 6502 | Lactobacillus salivarius | 37° C. | Anaerobic | MRS | Porcine | — |
| DPC 6484 | Streptococcus hyointestinalis | 37° C. | Anaerobic | GM17 | Pig caecum | 1-2 mm zone |
| DPC 6141 | Lactobacillus plantarum | 37° C. | Anaerobic | MRS | Japanese pickles | — |
| DPC 6689 | Lactobacillus plantarum | 37° C. | Anaerobic | MRS | Japanese pickles | — |
| DPC 6431 | Bacillus thuringiensis | 37° C. | Aerobic | BHI | Human faecal | — |
| DPC 6481 | Streptococcus salivarius (A2) | 37° C. | Aerobic | BHI | Infant | — |
| DPC 6482 | Enterococcus faecium | 37° C. | Anaerobic | MRS | Infant | — |
| DPC 6250 | Enterococcus faecalis | 37° C. | Anaerobic | MRS | Infant (anti - Listeria) | — |
| DPC 938 | Lactococcus diacetylactis | 37° C. | Aaerobic | GM17 | Cheddar | — |
| DPC 3286 | Lactococcus lactis | 30° C. | Aerobic | GM17 | — | — |
| DPC 3147 | Lactococcus lactis | 30° C. | Aerobic | GM17 | — | — |
| APC 806 | Lactobacillus paracasei | 37° C. | Anaerobic | MRS | — | — |
| APC 1576 | Bacillus paralicheniformis | 37° C. | Aerobic | BHI | Fish | 4-5 mm zone |
| APC 1571 | Bacillus licheniformis | 37° C. | Aerobic | BHI | Fish | — |
| APC 706 | Lactococcus lactis | 30° C. | Aerobic | GM17 | Nizo: NZ9700 | 3-4 mm zone |
| APC 3675 | Staphylococcus hominis APC3675 | 37° C. | Aerobic | BHI | Vaginal swab - | 2-3 mm zone |
| | | | | | colposcopy clinic | |

MRS, de Man, Rogosa and Sharpe; BHI, brain-heart infusion; GM17, glucose + M17.

### Discussion

[0157] Homicin represents a novel, plasmid encoded, narrow spectrum lantibiotic. Two different skin associated microbiomes (vagina and toe web-space), present in unrelated individuals from two different cohorts, highlights the dominance of this bacteriocin in the human population. Genome sequencing of the three S. hominis strains: APC 3675, APC 2924 and APC 2925 led to the identification of the genetic elements required for plasmid replication, conjugal transfer, lantibiotic production and immunity. The plasmid was found to encode several Tn552 transposons, flanking either end of the bacteriocin encoding segment of the plasmid DNA. Tn552, also described as a transposon DNA-invertase, was found to display 94-95% identity to other transposon elements in S. epidermidis and S. aureus strains in NCBI. The transposon located downstream of the bacteriocin operon was further classified as a site-specific DNA recombinase related to DNA invertase Pin (PinE), which allows for DNA recombination in inverted repeat (Kazuhiro et al., 1985). Moreover, Tn552 encodes a helix-turn-helix domain of Hin. The Hin recombinase induces the site-specific inversion of a DNA segment encoding a promoter, which controls the alternate expression of two genes by reversibly switching orientation (Mack et al., 1990). This interesting feature of the homicin operon would explain the directionality of the LanM modification enzymes as interpreted by Bagel4 (FIG. 5) and Artemis. Furthermore, the MobC plasmid relaxosome protein displayed 90% identity to many Staphylococcus epidermidis strains found in the NCBI database, suggesting that conjugative transfer of the mobile plasmid may have originated from an S. epidermidis skin isolate. It is not surprising that S. hominis and S. epidermidis would be involved in the conjugative transfer of plasmids as both organisms are commensal habitants of the skin microbiome. To date, there have been many two-component lantibiotics found to be encoded on plasmids. For example, staphylococcin C55 locus is located on a 32 kb plasmid in the strain S. aureus C55 (Navaratna et al., 1998), but has also been identified on a 38 kb pETB plasmid in S. aureus TY4 (Yamaguchi et al., 2001). Lacticin 3147 has also been identified on a 60.2 kb plasmid (Dougherty et al., 1998).

[0158] Analysis of the structural peptides responsible for antimicrobial production resulted in the identification of three putative peptides. The first homa-peptide was easily identifiable due to the degree of homology and conserved regions similar to other known two-component lantibiotics. However, the identification of two potential β-peptides was noteworthy and may be explained by the conjugative transfer of mobile genetic elements on the plasmid. It is predicted that homa binds to lipid II, thereby inhibiting cell wall synthesis through the prevention of transglycosylation. Subsequently, pore formation occurs with a rapid efflux of K+ and phosphate ions due to the presence of either homβ peptides. Similar to the findings described in the homicin encoded operon, the identification of a third antimicrobial peptide occurred during the purification of staphylococcin C55 (Navaratna et al., 1998). Navaratna et al. described the third, y-peptide, after inhibitory activity was detected in three distinct regions of eluent fluid after HPLC fractionation. The three peptides (staphylococcins C55α, C55β, and C55γ) were found to be responsible for the inhibitory activity of S. aureus C55.

[0159] However, there was no evidence of antibacterial interaction or synergy between staphylococcin C55γ with either C55α or C55β (Navaratna et al., 1998).

[0160] A more recent study identified a novel two-component lantibiotic termed thusin, that consisted of Thsα, Thsβ, and Thsβ′ (mutation of Thsβ), isolated from a B. thuringiensis strain BGSC 4BT1 (Xin et al., 2016). The sequences of ThsA2 (62 aa) and ThsA2′ (61 aa) were nearly identical (95% identity) and Xin et al. found that the mature peptides (Thsα and Thsβ (or Ths1′)) acted synergistically to inhibit several Gram-positive pathogens; with maximized bioactivity at a 1:1 ratio. Thus, further investigation and purification of the homβ lyophilised fraction will provide information on the synergistic effect between each homβ-peptides, in combination with the identified homa-peptide.

[0161] Indeed, the predicted structure in both α and β peptides display a high degree of similarity to other two-component lantibiotics. For example, the first three cysteine residues in homa are conserved among other two-component lantibiotics, with the exception of two additional cysteine residues at Cys-35 and Cys-37 (FIG. 5). Similarly, the cysteine residue at Cys-29 in the two β-peptides appears to be conserved among haloduracin, licheniciden, lacticin 3147 and plantaricin W β-peptides; however, the last cysteine residue at Cys-36 appears to form a lanthionine bridge with four amino acids; which is unique to the homicin lanthipeptide. When both β-peptides are compared to one another, it is interesting to note the additional lanthionine bridge formed in homβ2 (FIGS. 5 and 6). This lanthionine bridge is formed between Ser-13 and Cys-17, which appears to be conserved with the Ser-20 and Cys-24 bridge formation in other two-component bacteriocins (FIG. 4). Subsequently, due to this additional conserved region in homβ2, it would suggest that this β peptide may prove to display a higher degree of synergy with the homicin a peptide.

[0162] The surprising similarity of the LanM modification enzyme in V. dokdensis DW-10 to the homM modification enzymes lead to further investigation of the draft genome assembly for this strain. After downloading the nucleotide FASTA sequence, accessible from the NCBl database, for V. dokdensis DW-10, Bagel3 was used to search for a putative bacteriocin operon. Presumptive identification of a lantibiotic operon was found with 42% and 38% identity to haloduracin and lichenicidenVK21 α-peptides (see FIG. 12). However, to date there have been no lantibiotics published in the literature for V. dokdensis DW-10, suggesting that this method of screening for LanM similarities has led to the identification of a putative lantibiotic operon.

[0163] When comparing the three S. hominis strains by PFGE to identify genetic differences, all three strains had different pulsotypes. APC 3675 (vaginal isolate) had the most different pulsotype of the three, while APC 2925 (toe web-space skin isolate) had one extra Smal DNA band when compared to APC 2924 (toe web-space skin isolate from a different subject), demonstrating that the bacteriocin operon is conserved between three genetically distinct isolates. The fact that homicin was produced in three different strains of S. hominis, in different locations of the body, suggests a certain dominance associated with this particular bacteriocin. As the homicin operon has been verified to be on a plasmid, the inventors hypothesise that this gene cassette may be transferred via bacterial conjugation or horizontal gene transfer.

### REFERENCES

[0164] Altena K, Guder A, Cramer C and Bierbaum G. 2000. Biosynthesis of the lantibiotic mersacidin: organization of a type B lantibiotic gene cluster. Appl Environ Microbiol. 66(6):2565-71. doi: 10.1128/AEM.66.6.2565-2571.2000.
[0165] 5Arnison P G, Bibb M J, Bierbaum G, Bowers A A, Bugni T S, Bulaj G, et al. 2012. Ribosomally synthesized and posttranslationally modified peptide natural products: overview and recommendations for a universal nomenclature. Nat Prod Rep. doi:10.1039/C2NP20085F.
[0166] Azad M B, Konya T, Persaud R R, Guttman D S, Chari R S, Field C J et al. 2016. Impact of maternal intrapartum antibiotics, method of birth and breastfeeding on gut microbiota during the first year of life: a prospective cohort study. BJOG. 123(6):983-93. doi: 10.1111/1471-0528.13601.
[0167] Begley M, Cotter PD, Hill C, Ross RP. 2009. Identification of a Novel two-peptide lantibiotic, lichenicidin, following rational genome mining for LanM proteins. Appl Environ Microbiol. 75(17):5451-5460. doi:10.1128/AEM.00730-09.
[0168] Ben Zakour N L, Beatson S A, van den Broek A H M, Thoday K L, Fitzgerald J R. 2012. Comparative Genomics of the Staphylococcus intermedius Group of Animal Pathogens. Frontiers in Cellular and Infection Microbiology. 2:44. doi:10.3389/fcimb.2012.00044.
[0169] Berendonk T U, Manaia C M, Merlin C, Fatta-Kassinos D, Cytryn E, Walsh F, et al. 2015. Tackling antibiotic resistance: the environmental framework. Nat Rev Microbiol. p13(5):310-7. doi: 10.1038/nrmicro3439.
[0170] Bierbaum G, Götz F, Peschel A, Kupke T, van de Kamp M and Sahl HG. 1996. The biosynthesis of the lantibiotics epidermin, gallidermin, Pep5 and epilancin K7. Antonie Van Leeuwenhoek. 69(2):119-127.
[0171] Borghesi A, Stronati M, Fellay J. 2017. Neonatal Group B Streptococcal Disease in Otherwise Healthy Infants: Failure of Specific Neonatal Immune Responses. Frontiers in Immunology. 8:215. doi:10.3389/fimmu.2017.00215.
[0172] Carattoli A, Zankari E, Garcia-Fernandez A, Voldby Larsen M, Lund 0, et al. 2014. PlasmidFinder and pMLST: in silico detection and typing of plasmids. Antimicrob. Agents Chemother. 58(7):3895-903. doi: 10.1128/AAC.02412-14.
[0173] Chiller K, Selkin B A, Murakawa G J. 2001. Skin microflora and bacterial infections of the skin. Journal of Investigative Dermatology Symposium Proceedings. 6, 3:170-174.
[0174] Collins F W, O'Connor PM, O'Sullivan O, Rea M C, Hill C, Ross R P. 2016. Formicin—a novel broad-spectrum two-component lantibiotic produced by Bacillus paralicheniformis APC 1576. Microbiology. 162(9):1662-1671. doi: 10.1099/mic.0.000340.

[0175] Cotter P D, Ross R P, Hill C. 2013. Bacteriocins—a viable alternative to antibiotics? Nat Rev Microbiol. p11(2):95-105. doi: 10.1038/nrmicro2937.
[0176] Cotton J L, Tao J, Balibar C J. 2009. Identification and characterization of the Staphylococcus aureus gene cluster coding for staphyloferrin A. Biochemistry. 48(5):1025-35. doi: 10.1021/bi801844c.
[0177] Danesh A, Ljungh Å, Mattiasson B, Mamo G. 2017. Synergistic effect of haloduracin and chloramphenicol against clinically important Gram-positive bacteria. Biotech Rep. 13:37-41. doi:10.1016/j.btre.2016.12.008.
[0178] Dougherty B A, Hill C, Weidman JF, Richardson D R, Venter JC, Ross R P. 1998. Sequence and analysis of the 60 kb conjugative, bacteriocin-producing plasmid pMRC01 from Lactococcus lactis DPC3147. Mol Microbiol. 29(4):1029-38. PubMed PMID: 9767571.
[0179] Dy R L, Przybilski R, Semeijn K, Salmond G P, Fineran P C. 2014. A widespread bacteriophage abortive infection system functions through a Type IV toxin-antitoxin mechanism. Nucleic Acids Res. 42(7):4590-605. doi: 10.1093/nar/gkt1419.
[0180] Grice, E. A. and Segre, J. A. (2011) ‘The skin microbiome’, Nature Reviews Microbiology, 9(4), pp. 244-253. doi: 10.1038/nrmicro2537.
[0181] Fernández-López C, Bravo A, Ruiz-Cruz S, Solano-Collado V, Garsin D A, Lorenzo-Diaz F et al. 2015. Mobilizable Rolling-Circle Replicating Plasmids from Gram-Positive Bacteria: A Low-Cost Conjugative Transfer. Plasmids: Biology and Impact in Biotechnology and Discovery. ch15, p 257-276. doi:10.1128/microbiolspec.PLAS-0008-2013.
[0182] Field D, Connor P M, Cotter P D, Hill C, Ross R P. 2008. The generation of nisin variants with enhanced activity against specific gram-positive pathogens. Mol Microbiol. 69(1):218-30. doi: 10.1111/j.1365-2958.2008.06279.x.
[0183] Field D, Cotter P D, Hill C, Ross R P. Bioengineering lantibiotics for therapeutic success. frontiers in microbiology. 2015;6:1363. doi:10.3389/fmicb.2015.01363.
[0184] Garg N, Tang W, Goto Y, Nair S K, van der Donk W A. 2012. Lantibiotics from Geobacillus thermodenitrificans. Proceedings of the National Academy of Sciences of the United States of America. 109(14):5241-5246. doi:10.1073/pnas.1116815109.
[0185] Gopal Rao G, Nartey G, McAree T, O'Reilly A, Hiles S, Lee T, et al. 2017. Outcome of a screening programme for the prevention of neonatal invasive early-onset group B Streptococcus infection in a UK maternity unit: an observational study. BMJ Open, 7(4), e014634. http://doi.org/10.1136/bmjopen-2016-014634.
[0186] Götz F, Perconti S, Popella P, Werner R, Schlag M. 2014. Epidermin and gallidermin: Staphylococcal lantibiotics. Int J Med Microbiol. 304(1):63-71. doi: 10.1016/j.ijmm.2013.08.012.
[0187] Holo H, Jeknic Z, Daeschel M, Stevanovic S and Nes I F. 2001. Plantaricin W from Lactobacillus plantarum belongs to a new family of two-peptide lantibiotics. Microbiology. 147(Pt 3):643-51.
[0188] Holo H, Jeknic Z, Daeschel M, Stevanovic S, Nes I F. 2001. Plantaricin W from Lactobacillus plantarum belongs to a new family of two-peptide lantibiotics. Microbiology. 147(Pt 3):643-51.
[0189] Il Kim, P. et al. (2010) 'Biochemical and Biophysical Research Communications Characterization and structure identification of an antimicrobial peptide , hominicin , produced by Staphylococcus hominis MBBL 2-9′, Biochemical and Biophysical Research Communications. Elsevier Inc., 399(2), pp. 133-138. doi: 10.1016/j.bbrc.2010.07.024.
[0190] Joensen K G, Scheutz F, Lund O, Hasman H, Kaas R S, Nielsen E M,et al. 2014. Real-time whole-genome sequencing for routine typing, surveillance, and outbreak detection of verotoxigenic Escherichia coli. J Clin Micobiol. 52(5): 1501-1510.
[0191] Kazuhiro K. and Toshifumi N. 1985. A gene for DNA invertase and an invertible DNA in Escherichia coli K-12. Gene 34(2), pp.343-350.
[0192] Kleinheinz K A, Joensen K G, Larsen M V. 2014. Applying the ResFinder and VirulenceFinder web-services for easy identification of acquired antibiotic resistance and E. coli virulence genes in bacteriophage and prophage nucleotide sequences. Bacteriophage. 4:e27943. doi:10.4161/bact.27943.
[0193] Larsen M V, Cosentino S, Rasmussen S, Friis C, Hasman H, Marvig RL, et al. 2012. Multilocus sequence typing of total-genome-sequenced bacteria. J Clin Microbiol. 50(4):1355-61. doi: 10.1128/JCM.06094-11.
[0194] Mack D P, Sluka J P, Shin J A, Griffin J H, Simon M I, Dervan P B. 1990. Orientation of the putative recognition helix in the DNA-binding domain of Hin recombinase complexed with the hix site. Biochemistry 29(28):6561-7.
[0195] Mathur H, Field D, Rea M C, Cotter P D, Hill C, Ross RP. Bacteriocin-antimicrobial synergy: a medical and food perspective. Frontiers in Microbiology. 2017;8:1205. doi:10.3389/fmicb.2017.01205.
[0196] McAuliffe O, Hill C, Ross R P. 2000. Each peptide of the two-component lantibiotic lacticin 3147 requires a separate modification enzyme for activity. Microbiology. 146:2147-54. doi: 10.1099/00221287-146-9-2147.
[0197] McAuliffe O, Ross R P, Hill C. Lantibiotics: structure, biosynthesis and mode of action. FEMS Microbiol Rev. 2001 May;25(3):285-308.
[0198] McClerren A L, Cooper L E, Quan C, Thomas P M, Kelleher N L and van der Donk WA. 2006. Discovery and in vitro biosynthesis of haloduracin, a two-component lantibiotic. Proc Natl Acad Sci USA. 103(46):17243-8.
[0199] Navaratna M A, Sahl H G and Tagg J R. 1998. Two-component anti-Staphylococcus aureus lantibiotic activity produced by Staphylococcus aureus C55. Appl Environ Microbiol. 64(12):4803-8
[0200] Navaratna MADB, Sahl H-G, Tagg J R. 1998. Two-component anti-Staphylococcus aureus lantibiotic activity produced by Staphylococcus aureus C55. Applied and Environmental Microbiology. 64(12):4803-4808.
[0201] O'Connor E B, Cotter P D, O'Connor P, O'Sullivan O, Tagg J R, Ross R P, et al. 2007. Relatedness between the two-component lantibiotics lacticin 3147 and staphylococcin C55 based on structure, genetics and biological activity. BMC Microbiol. 2;7:24.
[0202] Ohlsson A, Shah V S. 2009. Intrapartum antibiotics for known maternal group B streptococcal colonization. Cochrane Database Syst Rev. (3):CD007467. doi: 10.1002/14651858.CD007467.pub2.
[0203] Otto, M. (2010) ‘Staphylococcus colonisation of the skin and antimicrobial peptides’, Expert Rev Dermatol., 5(2), pp. 183-195. doi: 10.1586/edm.10.6.Staphylococcus.
[0204] Patras K A, Wescombe P A, Rosier B, Hale J D, Tagg J R, Doran K S. 2015. Streptococcus salivarius K12 limits group b streptococcus vaginal colonization. Camilli A, ed. Infection and Immunity. 83(9):3438-3444. doi:10.1128/IAI.00409-15.
[0205] Pieterse R, Todorov S D, Dicks L M. 2008. Bacteriocin ST91KM, produced by Streptococcus gallolyticus subsp. macedonicus ST91KM, is a narrow-spectrum peptide active against bacteria associated with mastitis in dairy cattle. Can J Microbiol. 54(7):525-31. doi: 10.1139/w08-040.
[0206] Poyart C, Tazi A, Réglier-Poupet H, et al. Multiplex PCR Assay for Rapid and Accurate Capsular Typing of Group B Streptococci. Journal of Clinical Microbiology. 2007;45(6):1985-1988. doi:10.1128/JCM.00159-07.
[0207] Ramana K V, Vikram G, Wali P P, Anand K, Rao S D, Mani RMS, Sarada VCH and Rao R. 2014. Non diphtheritic corynebacteria (NDC) and their clinical significance: clinical microbiologist's perspective. Am J Epidemiol. 2014; 2:83-7.
[0208] Robins E, Haile-Selassie T. 2001. Corynebacterium xerosis sepsis in a pediatric patient with sickle cell disease (a case report). Clinical pediatrics. 40(3):181.
[0209] Ryan M P, Rea M C, Hill C and Ross R P. 1996. An application in cheddar cheese manufacture for a strain of Lactococcus lactis producing a novel broad-spectrum bacteriocin, lacticin 3147. Appl Environ Microbiol. 62:612-619.
[0210] Sasikumari O and Thomas, S. 2018. Isolation of Corynebacterium xerosis from clinical specimens: A case series. Journal of The Academy of Clinical Microbiologists. 20(1), p.43.
[0211] Sawa N, Wilaipun P, Kinoshita S, et al. Isolation and characterization of enterocin w, a novel two-peptide lantibiotic produced by Enterococcus faecalis NKR-4-1. Applied and Environmental Microbiology. 2012;78(3):900-903. doi:10.1128/AEM.06497-11.
[0212] Siegers K, Heinzmann S, and Entian K D. 1996. Biosynthesis of Lantibiotic Nisin: posttranslational modification of its prepeptide occurs at a multimeric membrane-associated lanthionine synthetase complex. J Biol Chem. 271: 12294. doi:10.1074/jbc.271.21.12294.
[0213] Sievers F, Wilm A, Dineen D, et al. 2011. Fast, scalable generation of high-quality protein multiple sequence alignments using Clustal Omega. Molecular Systems Biology. 7:539. doi:10.1038/msb.2011.75.
[0214] Singh M, Sareen D. Novel LanT Associated Lantibiotic Clusters Identified by Genome Database

[0215] Mining. Biswas I, ed. PLoS ONE. 2014;9(3):e91352. doi:10.1371/journal.pone.0091352.
[0216] Sung, C. et al. (2010) ‘Probiotic potential of Staphylococcus hominis MBBL 2-9 as anti-Staphylococcus aureus agent isolated from the vaginal microbiota of a healthy woman’, 108, pp. 908-916. doi: 10.1111/j.1365-2672.2009.04485.x.
[0217] Van Heel A J, de Jong A, Song C, Viel J H, Kok J, Kuipers OP. 2018. BAGEL4: a user-friendly web server to thoroughly mine RiPPs and bacteriocins, Nucleic Acids Research, Volume 46, Issue W1, 2 Jul. 2018, Pages W278-W281, https://doi.org/10.1093/nar/gky383.

[0218] Verani J R, McGee L, Schrag S J; Centers for Disease Control and Prevention (CDC). 2010. Prevention of perinatal group B streptococcal disease--revised guidelines from CDC. Morb Mortal Wkly Rep. 59(RR-10):1-36.
[0219] Waterhouse A M, Procter J B, Martin DMA, Clamp M, Barton G J. 2009. Jalview Version 2—a multiple sequence alignment editor and analysis workbench. Bioinformatics. 25(9):1189-91 doi: 10.1093/bioinformatics/btp033.
[0220] Weber T, Blin K, Duddela S, et al. 2015. antiSMASH 3.0—a comprehensive resource for the genome mining of biosynthetic gene clusters. Nucleic Acids Research. 43(Web Server issue):W237-W243. doi:10.1093/nar/gkv437.
[0221] World Health Organization (WHO). 2014. Antimicrobial resistance: global report on surveillance. p25′7; ISBN 978 92 4 156474 8.
[0222] Xin B, Zheng J, Liu H, Li J, Ruan L, Peng D, et al. 2016. Thusin, a Novel Two-Component Lantibiotic with Potent Antimicrobial Activity against Several Gram-Positive Pathogens. Front Microbiol. 7:1115. doi: 10.3389/fmicb.2016.01115.
[0223] Yang K, Kruse R L, Lin W V, Musher D M. 2018. Corynebacteria as a cause of pulmonary infection: a case series and literature review. Pneumonia.10(1):10.
[0224] Yamaguchi T, Hayashi T, Takami H, Ohnishi M, Murata T, Nakayama K. 2001. Complete nucleotide sequence of a Staphylococcus aureus exfoliative toxin B plasmid and identification of a novel ADP-ribosyltransferase, EDIN-C. Infect Immun. 69(12):7760-71.
[0225] Yoon J H, Kang S J, Lee S Y, Lee M H, Oh TK. 2005. Virgibacillus dokdonensis sp. nov., isolated from a Korean island, Dokdo, located at the edge of the East Sea in Korea. Int Syst Evol Microbiol. 55(Pt 5):1833-7.
[0226] Zankari E, Hasman H, Cosentino S, Vestergaard M, Rasmussen S, Lund O, Aarestrup F M, Larsen M V. 2012. Identification of acquired antimicrobial resistance genes. J Antimicrob Chemother. doi: 10.1093/jac/dks261.
[0227] Zasada A A and Mosiej E. 2018. Contemporary microbiology and identification of Corynebacteria spp. causing infections in human. Letters in applied microbiology. 66(6):472-83.

1. An isolated lantibiotic comprising:
amino acid sequence SEQ. ID No. 2 or a variant amino acid sequence thereof having at least 90% amino acid sequence identity thereto, and
at least one of:
amino acid sequence SEQ. ID No. 4 or a variant amino acid sequence thereof having at least 90% amino acid sequence identity thereto, and
amino acid sequence SEQ. ID. No 6 or a variant amino acid sequence thereof having at least 90% amino acid sequence identity thereto.

2. The lantibiotic as claimed in claim 1, wherein the variant amino acid sequence of SEQ. ID No. 2 has at least 95% amino acid sequence identity thereto, the variant amino acid sequence of SEQ. ID No. 4 has at least 95% amino acid sequence identity thereto and the variant amino acid sequence of SEQ. ID No. 6 has at least 95% amino acid sequence identity thereto.

3. The lantibiotic as claimed in claim 1 or 2, wherein the lantibiotic comprises both:
amino acid sequence SEQ. ID No. 4 or the variant amino acid sequence thereof, and
amino acid sequence SEQ. ID. No 6 or the variant amino acid sequence thereof.

4. The lantibiotic as claimed in any one of claims 1 to 3, wherein the lantibiotic comprises:
amino acid sequence SEQ. ID No. 2, and
at least one of:
amino acid sequence SEQ. ID No. 4, and
amino acid sequence SEQ. ID. No 6.

5. The lantibiotic as claimed in any one of claims 1 to 4, wherein the lantibiotic comprises:
amino acid sequence SEQ. ID No. 2,
amino acid sequence SEQ. ID No. 4, and
amino acid sequence SEQ. ID. No 6.

6. The lantibiotic as claimed in any one of claims 1 to 5 for use as a medicament.

7. The lantibiotic as claimed in any one of claims 1 to 5 for use in the treatment or prevention of a bacterial infection.

8. The lantibiotic for use as claimed in claim 7 wherein the bacterial infection is infection by gram positive bacteria.

9. The lantibiotic for use as claimed in claim 8 wherein the gram positive bacteria are Group B Streptococcus.

10. The lantibiotic for use as claimed in claim 8 wherein the gram positive bacteria are Corynebacterium xerosis.

11. A pharmaceutical composition comprising the lantibiotic as claimed in any one of claims 1 to 5 and a pharmaceutically acceptable carrier.

12. An isolated S. hominis strain selected from the group consisting of S. hominis APC 3675 deposited under NCIMB 43358, S. hominis APC 2924 deposited under NCIMB 43356 and S. hominis APC 2925 deposited under NCIMB 43357.

13. The isolated S. hominis strain of claim 12 for use as a medicament.

14. The isolated S. hominis strain of claim 12 for use in the treatment or prevention of a bacterial infection.

15. The isolated S. hominis strain for use as claimed in claim 14 wherein the bacterial infection is infection by gram positive bacteria.

16. The isolated S. hominis strain for use as claimed in claim 15 wherein the gram positive bacteria are Group B Streptococcus.

17. The isolated S. hominis strain for use as claimed in claim 15 wherein the gram positive bacteria are Corynebacterium xerosis.

18. A method for producing the lantibiotic as claimed in any one of claims 1 to 5, the method comprising combining amino acid sequence SEQ. ID No. 2 or the variant amino acid sequence thereof with at least one of:
amino acid sequence SEQ. ID No. 4 or the variant amino acid sequence thereof, and
amino acid sequence SEQ. ID. No 6 or the variant amino acid sequence thereof.

19. An isolated nucleotide sequence comprising
SEQ ID No.15 or a variant nucleotide sequence thereof which has at least 90% sequence identity to SEQ ID No.15 or to a nucleotide sequence that is capable of hybridising to SEQ ID No.15 under stringent conditions, and
at least one of:
SEQ ID No.17 or a variant nucleotide sequence thereof which has at least 90% sequence identity to SEQ ID No.17 or to a nucleotide sequence that is capable of hybridising to SEQ ID No.17 under stringent conditions, and
SEQ ID No.19 or a variant nucleotide sequence thereof which has at least 90% sequence identity to SEQ ID No.19 or to a nucleotide sequence that is capable of hybridising to SEQ ID No.19 under stringent conditions.

20. The isolated nucleotide sequence as claimed in claim 19, wherein the variant nucleotide sequence of SEQ. ID No. 15 has at least 95% sequence identity thereto or to a nucleotide sequence that is capable of hybridising to SEQ ID No.15 under stringent conditions, the variant amino acid sequence of SEQ. ID No. 17 has at least 95% amino acid sequence identity thereto or to a nucleotide sequence that is capable of hybridising to SEQ ID No.17 under stringent conditions and the variant amino acid sequence of SEQ. ID No. 19 has at least 95% amino acid sequence identity thereto or to a nucleotide sequence that is capable of hybridising to SEQ ID No.19 under stringent conditions.

21. The isolated nucleotide sequence as claimed in claim 19 or 20, wherein the isolated nucleotide sequence comprises both:
nucleotide sequence SEQ. ID No. 17 or the variant nucleotide sequence thereof, and
nucleotide sequence SEQ. ID. No 19 or the variant nucleotide sequence thereof.

22. The isolated nucleotide sequence as claimed in any one of claims 19 to 21, wherein the isolated nucleotide sequence comprises:
nucleotide sequence SEQ. ID No. 15, and
at least one of:
nucleotide sequence SEQ. ID No. 17, and
nucleotide sequence SEQ. ID. No 19.

23. The isolated nucleotide sequence as claimed in any one of claims 19 to 22, wherein the isolated nucleotide sequence comprises:
nucleotide sequence SEQ. ID No. 15,
nucleotide sequence SEQ. ID No. 17, and
nucleotide sequence SEQ. ID. No 19.

24. An isolated nucleotide sequence encoding a polypeptide comprising amino acid sequence SEQ. ID No. 2, 4 and 6.

25. A vector comprising an isolated nucleotide sequence as claimed in any one of claims 19 to 24.

26. The vector as claimed in claim 25, wherein the vector further comprises one or more of SEQ ID No. 14, 16, 18, 20, 21, 22, 23, 24, 25 and 26.

27. A host cell comprising a vector as claimed in claim 25 or 26.

28. A method of producing the lantibiotic as claimed in any one of claims 1 to 5, the method comprising the step of cultivating at least one of the strains as claimed in claim 12 or a host cell as claimed in claim 27 under conditions suitable for production of the lantibiotic.

29. The host cell of claim 27 for use as a medicament.

30. The host cell of claim 27 for use in the treatment or prevention of a bacterial infection.

31. The host cell for use as claimed in claim 30 wherein the bacterial infection is infection by gram positive bacteria.

32. The host cell for use as claimed in claim 31 wherein the gram positive bacteria are Group B Streptococcus.

33. The host cell for use as claimed in claim 31 wherein the gram positive bacteria are Corynebacterium xerosis.

34. An isolated plasmid comprising SEQ ID No. 15, 17 and 19, optionally wherein the plasmid further comprises one or more of SEQ ID No. 14, 16, 18, 20, 21, 22, 23, 24, 25 and 26.

35. A biotherapeutic comprising a strain as claimed in claim 12 or a host cell as claimed in claim 27 for use in inhibiting colonisation of pathogenic gram positive bacteria on human skin or vagina.

36. A method of treatment or prevention of a bacterial infection comprising administering the lantibiotic as claimed in any one of claims 1 to 5 to a subject in need thereof.

37. The method as claimed in claim 36 wherein the bacterial infection is infection by gram positive bacteria.

38. The method as claimed in claim 37 wherein the gram positive bacteria are Group B Streptococcus.

39. The method as claimed in claim 37 wherein the gram positive bacteria are Corynebacterium xerosis.

40. A method of treatment or prevention of a bacterial infection comprising administering an isolated S. hominis strain as claimed in claim 12 or a host cell as claimed in claim 27 to a subject in need thereof.

41. The method as claimed in claim 40 wherein the bacterial infection is infection by gram positive bacteria.

42. The method as claimed in claim 41 wherein the gram positive bacteria are Group B Streptococcus.

43. The method as claimed in claim 41 wherein the gram positive bacteria are Corynebacterium xerosis.

44. Use of a lantibiotic as claimed in any one of claims 1 to 5 in the preparation of a medicament for the treatment or prevention of a bacterial infection.

45. The use as claimed in claim 44 wherein the bacterial infection is infection by gram positive bacteria.

46. The use as claimed in claim 45 wherein the gram positive bacteria are Group B Streptococcus.

47. The use as claimed in claim 45 wherein the gram positive bacteria are Corynebacterium xerosis.

48. Use of an isolated S. hominis strain as claimed in claim 12 or a host cell as claimed in claim 27 in the preparation of a medicament for the treatment or prevention of a bacterial infection.

49. The use as claimed in claim 48 wherein the bacterial infection is infection by gram positive bacteria.

50. The use as claimed in claim 49 wherein the gram positive bacteria are Group B Streptococcus.

51. The use as claimed in claim 49 wherein the gram positive bacteria are Corynebacterium xerosis.

The application's sequence listing, which the Patent Office published only in electronic form, follows.

SEQUENCE LISTING (82 sequences)

SEQ ID NO: 1 - protein, 35 aa, Staphylococcus hominis
MSNKDLELFNTAGDLIQELKDGDLNIHLYGESEIR

SEQ ID NO: 2 - protein, 31 aa, Staphylococcus hominis
KKSFSQKTGNDGKHCTITWECSICPTKTCWC

SEQ ID NO: 3 - protein, 23 aa, Staphylococcus hominis
LKQNSRITLDELNKITMGTSEVR

SEQ ID NO: 4 - protein, 31 aa, Staphylococcus hominis
KGKGGGFSTVTVVTPIVPTSKCASIVKPCNK

SEQ ID NO: 5 - protein, 20 aa, Staphylococcus hominis
MTKITKDDLKKITENRIEAR

SEQ ID NO: 6 - protein, 34 aa, Staphylococcus hominis
THPTVVPVSAAVCGVATKLVPTSKCASIVKPCNK

SEQ ID NO: 7 - protein, 977 aa, Staphylococcus hominis
MMNINSLIPRIFKDLDSNNLEKVAKKIFDTEFEDLKMKINQEINNNNKIDFEKYDFNFSIDNFEDLMLFIVKSSKLDYLKALQKLSNIDENKANKLNSDILSQISENLMRISYRTIVYDLNLNRSQGQLKSSTEEEQFNEYINRLSQKNYRLEFINKYYNLILFLEANIRQIDKYINNFFELLLKDEKELIDSNEDYLLNISLGLGDTHNQGESVIKCIYTHKSFYFKPRNGKIDQLYNKILDYINKSLNCNLKKTEIIVKKNYFWVNEVDYKECNDITQIENFYYELGMHLFLLYVLGATDFHSENLIASQEHPILVDLESVIGNKLSKNSFKDATYFNHYLLSSSVKTTGILPFIFGNNEGADFSGLGGKEGLSSLKVPTIKNVRSSNMRVESDYIKLSSNQNHPKINEEFVNEKNYKVNLINGFKDCYNFIEYNKNEFYSLIENNINDVNVRYINNATMQYARILNLSFHPLILQSITLRKLFIAYYLYNDFDRLSKYEINNLIDMNIPYFYYNGISKNLFNETKVIENFFYYPLKESVSYKISKLNESDMKWQISIISDSLREDNSSFIPHMTLHSIKNYNNVKNYTTSEKEEKFNSLICSIEEIILEEQIEINNTYSWMTKELYGTPGTRTVEREVMEINLYKGLCGMALYYWALYQHTQDKKYLLKVENLILQIEEEIQYYTDYPIGAYDGIYSYIYLCAVVYKKTKKEKYIHTAIKYINLSKGKISVENDTDFISGLSGVLVILINLYHIVNNLDYKNTIEEAIELSVNTLLNKMHKTNNNLINWQDSEDDVTVGFAHGVSGITYALSLYINNFKYDKNIENIISLANQYEETYRIEHYWPHPYSQEARPPYAWCHGSPGIMLNREKSNYTSNDRKKIIEKIFEEGFSRTHCLCHGDLGNAMILKDILPTSEKMGNIIFDILKNFNAKDLKCGVGEDIQSIDLLTGLSGISYGLIYLMNDDIPNVLRLEI

SEQ ID NO: 8 - protein, 873 aa, Staphylococcus hominis
LGDKMDYLIKKIYEDNSEIFEYFLNNIYSSYNDFITIDFINNIKKNNFLYFKNVIKRYLVVNFQDTYKNSIKESDSNLYLNKYMKEFNLNDHHTLKENMLYKMNLYHKFIFTIIKNAYNDRKLLVEDKGLIDNIKVDFGDSHNGGQTVAIVYFENIKWIYKPKNLKKDKLYFSCLKVINDNLNVKYREPKIILRDNYSWQSFIEHLPCKNEVMINNYYYSLGIQACLLFILNANDMHFENLIANGEYPVFIDLETLLQTDIDFSNSNLEHYPSNDNVLNTLLFDVSDNSSVMDHIGGFTNRKGMPIYDITMFNKDNDQISIVESSEIYTKSTPNIPLNAKKEPVEIYEKKEIFLEGFKNSYKTIQNNFHNFLNTLNKYENLETRIVLRPTTVYANYIEYFKQMENESDNEILDILYNSIPFYKKSKKIAEYEINSLKNFDIPYFKVGLKSKKLTSVDDNLYINEFFKKTPYEKLEQKLSHLHNEDLNRQLYLLKLSIDAYRELNDSKNNECPNKREVDTTIQHEIELIEKYLDTQDTVFNIELNIEGKTAVTPISYNLYFGLSGVSLLYLQYQKTANNYFYSSVFNGLYDSIYTMWKLDKSNNYSIYHGRFSYFKYVYLLNNFFNFQIDINIELQKTLKDYISYIEDNKSYTIDYLGGLSGIISLLLDFYKSNDNHSYLKKDIIFLTKKLIENISIKNNEIVVKSDITNGSMKAGLAHGTSGIIFALAKYQTEFHDDKLSDIIERMISIENNELALIKNNAWCNGLSGIVLSRNIIQNYGISNELLNIVSLKSQLLNGFPIGVESVCHGSSGNSLILKTMNINKNNQHILSYEWTSGYLFPNENISFFMGISGQLFNLLTTSKDKDLIEKLLI

SEQ ID NO: 9 - protein, 433 aa, Staphylococcus hominis
VLILTKNNTEIKNCVYTITCNNKKTYLECIQFSLRNKLRILCKINEIYTFQIFGIIPRNYNIYLKRAGAVISTSFKKIQPLSSSKNYVDEYTNPKKIQWDVIRTTNNYESHRKAKGSHSHSVGIIDSGIDINHQDLVDNILSIRNFVPHQFPNQDGEFKVDPLYMKDYLDHGTQVAGQICANGEITSIAPNTGIKIYRVFGEREGYNIWIIDAIIHAANDGVDVINLSLGSYLLDGDYKKKGEWNNNNSEIIAFKKAITYAYQKGCVVVGSLGNDSINIDDQKILASEIVNKKDISDIQKKSQIYDFPCQIPNVFGVAAANYFDKISSYSNKSNLNLDILSYAGDYSLLEKYGRKEWLNKKYITKDWILSTSSETVYTYTTGNSLATAKVSAAIAAMNDYYNIEKQPSKSISLIKSKSNKILNMSNLVSSDLR

SEQ ID NO: 10 - protein, 575 aa, Staphylococcus hominis
MYNNYLHFLFTKIKIPKMQLFISILISTLGALSGLMIPLFAGKFIDSFSLKTINKDMIIYLLILFIVNGILMGLGNYFMGVVGEKINYSIKTVFFDKIIRLKLPFFDQNDTGQLISRMVDDTSIINDFLSNKLPTIFPSVLTFVGAIFFLLVIDWQMTVISLLTMLTFILFIVPIGRIVHNISLKTQNEIANFSTLLNKIFTEIRLVKTSNTERKETKNANTILNNLYSLGVKEVIVESIINPISSLIMLLTIGIILSVGGIRVSLGIITSGELIAMIFYVFQLSNPINEILTFFTDYKKTSGASNRIYEIFQEEEEDIYNSLEHKTLDNNSLTFENVSFTYNNVSILNNISFNIPKNQLTAIVGPSGSGKTTILNIIERLYPIQSGNIYYGNKSIFEIPLSTWRRNIGYVMQDNPMMNKSIKYNLLYSTSKSLTNHEIINYTKMTDSYDFIINTIKGFDTIIGERGIKLSGGQRQRLDLTRNLIKNPPLFLFDEATSNLDSESEQKIQNAIDNLNGKKTIVIVAHRLSTIKKAHQIIFVENNKITGIGTHKKLLEKHDKYRMFVNTQNLSNLNS

SEQ ID NO: 11 - protein, 275 aa, Staphylococcus hominis
MLKIDSLSVNLKNNNILKDINYKFIENTVYGLLGPNGAGKTTLFKSILEVIDYSGKIEFQKNKNIGHLIDYPAFYANLTCEENLILHARYLGINTLHIDKLLSIVNLNSARNKKFKNLSMGMKQRLGIAKTLIGNSNLILLDEPSNGLDPMGIKDIRDIIISEIKNEKRVTIVSSHILRELSEFTDVFLFIQNGKLIAHLRNNKRHYSLVEINDRTNNLDFKINNEYSIIKSSGRFYILGDYNELVKYYNNAKKMTLEEVYLKIMSMKVEEAYLK

SEQ ID NO: 12 - protein, 240 aa, Staphylococcus hominis
MITFIKNEIIKIRSERFIIIVFLLSLLPFIMNIANFFINNKDLSLIDGFYFRFYNQYFMITPIAIGIIGSSIFYIEFKNHTLLNWLSYSKNKYKLFFSKFLVSFLYCTFLYLLNLILLLLFYFIFDGLSESLVMIIISFTVLNLLLTTFLIPLSITLVTIFNNYIVSLVITIGITMVSLILIPAPFSNLIPTTLSYRVGLDIIDSSMGFESSNDIIVGIMLLIIISIIFIFTGVRNLKIR

SEQ ID NO: 13 - protein, 684 aa, Staphylococcus hominis
MVKRIDFHIHTVSSNKDYDFTYSSDWIKRYVEEAELDAIAITNHDLFDLENFKKVKEDLPDITVFPGIELSLEEGHVNIIFSEEDIENLVNFSNWLSKNELEIRDTISTEDFCNNMVNWENGIYIFEMGKSNSLSVPEKLSNSSITIAGGVANQLKFQSIYNQENMLIPLLFSDAHAADDDPEPKRKNIHLLKMKNTFLQIDNCTFSEIKNCIKNKKAIHINEKNLRDVIEINNHMVSTGMNLIVGKRGTGKTEFLKNIKKQYDDDEYYEIAQFETARADEYIEKQRKEQGQFAFDIWKRKYESQFRTIIEYLNRDENEFDGVVEKYLESVKNFAKDNNLSNSKEKYLLHKESKFDKIPTANLEKYLTDLKSLIQSNEFWSLLKNPNEKKQVFIETYNELRILYIEKQQENKIKERVNEILESVKKLVQSRTGVTTVLDCEFSEIIQKQQMEKQINTFMKNIICEQELKRENVYGYQIIVKISPFENASQFQSVASTREAVNDEIIKPYLQSDYITFLNNLKKKKFYKTSDLANYFINLTVELLDSDGTPASGGQAVGFALMMRLEESKNKPIILIDEPEASLDNAYIRDELIPALNNLSRESTVFVVTHNSTLGALINPDYLIVTTKDQNNNYKVLTGEFSSNSISNNLGVSESSYNKFVEAMESGIETYRKKGETYENLRNK

SEQ ID NO: 14 - DNA, 105 bp, Staphylococcus hominis
atgagtaataaagatttagaattatttaatacagccggtgatttaatacaagaattaaaagatggtgacctaaatatccatttatatggtgaatcggaaattaga

SEQ ID NO: 15 - DNA, 93 bp, Staphylococcus hominis
aaaaaatctttctctcaaaaaacagggaatgatgggaaacattgtacaattacttgggaatgttctatatgtcctactaaaacttgttggtgc

SEQ ID NO: 16 - DNA, 69 bp, Staphylococcus hominis
ttgaaacaaaatagtagaattactttagatgaattaaacaaaattactatgggaacttcagaggtaaga

SEQ ID NO: 17 - DNA, 96 bp, Staphylococcus hominis
aaaggaaaaggaggcggttttagtaccgtaaccgttgtaacaccaattgtaccgacatcgaagtgtgcctcaattgtaaaaccatgtaacaaataa

SEQ ID NO: 18 - DNA, 60 bp, Staphylococcus hominis
atgactaaaataactaaagatgatttgaaaaagattacagaaaatcgtattgaagcacgt

SEQ ID NO: 19 - DNA, 105 bp, Staphylococcus hominis
acacatccaaccgttgttcctgtaagtgctgctgtatgcggagttgctactaaattagtaccaacatcgaaatgtgcttcaattgtaaaaccatgtaataaataa

SEQ ID NO: 20 - DNA, 2934 bp, Staphylococcus hominis
atgatgaatattaatagtttaatccccagaatattcaaagatttagattctaataatttagagaaagtagcaaaaaaaatttttgatactgaatttgaagatttaaagatgaaaatcaatcaagaaattaataataataataagattgattttgaaaagtatgatttcaacttttctatagataattttgaagacttaatgctttttattgttaaatcttcaaaattagattatttaaaagcattacaaaaattgtctaacattgatgaaaataaagctaataagttaaattcggatattttgtctcagatttctgaaaatttaatgaggatttcatatagaacaatagtttatgatttaaatttaaatagaagccaaggccaattgaaatcttctacagaagaggaacaatttaatgaatatataaatagacttagtcaaaaaaactatagattagaatttattaataaatattataatcttatactttttttggaagctaatattagacaaatagataaatatatcaataatttttttgaattattgttaaaagatgaaaaagaattaattgatagtaatgaagattatttactaaatattagtttaggattgggtgatactcacaatcaaggtgaatcggtaatcaaatgtatatatacacataaatcattctatttcaaaccgagaaatggtaaaatagatcaactttataataaaatactagattatattaataaatccttgaattgtaaccttaaaaaaacggaaataatagttaaaaagaattatttttgggttaatgaagtagattataaagagtgtaatgatattactcaaattgaaaatttttactatgaattaggcatgcatttgttcttgctatatgtattaggtgctactgatttccactcagaaaatctcatagcctcgcaagagcacccgattttagtggatttagaaagcgtgataggaaacaaacttagtaaaaattcttttaaagatgctacttattttaatcactatttattatcttcatctgtaaaaactacgggtattcttccctttattttcggtaataatgaaggagccgattttagcgggttaggtggaaaagaaggactttcctctttaaaagttccaactataaaaaatgtacgatcttctaatatgagagttgaatcagattatattaagttatcttcaaaccaaaatcatcctaaaattaatgaggagtttgttaacgaaaaaaactataaagttaatttaattaatggatttaaagattgctataattttatagaatataataaaaatgagttttatagtttaattgaaaataatataaatgacgttaatgttagatatattaataatgcaacaatgcagtatgcacgtatactcaatttaagtttccatcctttaatacttcagagtataactctgagaaagttatttattgcttattatctatataacgattttgataggttgtctaaatatgaaataaataacttaatagatatgaatattccttatttctattacaatgggatatctaaaaatttatttaatgaaactaaagtaattgaaaactttttttattatccattaaaagaaagtgtttcttataaaattagtaaattgaatgagagcgatatgaaatggcaaatttctattatttcagattctttaagagaagataatagctcattcatacctcatatgacgttgcattcaattaaaaattataacaatgttaaaaactatactactagtgaaaaagaagaaaaattcaactctctaatttgttctatagaagagattattttagaagagcaaattgaaataaataatacatatagttggatgacaaaggaattatatggtactcctggaactagaactgttgaaagagaagtaatggaaataaatttatataaaggtttatgtggtatggctttatattattgggctctttatcaacatacacaagacaaaaaatatcttttaaaagttgagaatttaatattacaaattgaggaagaaattcaatactatacagactatccaattggagcctatgacggcatatattcttatatatatttatgcgcagttgtgtataaaaagactaaaaaggaaaaatatatacatactgcaattaaatatataaatttatccaaagggaaaatttcagtcgaaaatgatactgactttatcagcggtctttctggagtactagtaattttgattaatttatatcatatagtaaataacttagattacaaaaatactattgaagaagctattgagttatcagtaaacactttactcaataaaatgcataaaaccaataataatttaattaattggcaagacagtgaagatgatgtaactgttggctttgctcatggagtatctggtataacctatgccttgagtttatatatcaataattttaaatatgataaaaatattgaaaatattatttctctagctaatcaatatgaagagacttatcgcattgaacattattggcctcatccgtatagtcaagaggcaagacctccttatgcatggtgtcatgggtctccaggtattatgttaaatagagaaaagagtaattatacaagtaatgatagaaaaaaaatcattgaaaaaatatttgaagaaggtttttctagaacccattgcttgtgtcatggagacttaggtaatgcgatgatattaaaagatatattaccaacaagtgaaaaaatggggaatataatatttgatatacttaaaaattttaatgctaaagatctaaaatgtggagtaggagaagatattcaaagtatagatttattaacaggtttgtctggtatttcctatggattgatatatttaatgaatgatgatattcctaatgttttaagattagaaatatag

SEQ ID NO: 21 - DNA, 2622 bp, Staphylococcus hominis
ttgggtgataaaatggactacttaataaaaaaaatatatgaagataattccgaaatatttgaatactttttaaacaacatctattcatcttataacgattttataaccatcgattttataaataatataaaaaaaaataactttttatattttaaaaatgtaataaaaagatatctagttgttaattttcaagatacatataaaaactctattaaagagagtgattctaatttatatttaaataaatatatgaaagagttcaatttaaatgaccatcatactttaaaagaaaacatgttatataaaatgaatttatatcataaatttatttttactattatcaaaaatgcttataatgatagaaaactattagttgaagataaaggcttaatagataatattaaagttgattttggagattctcacaatggagggcaaacagtagctatagtatattttgaaaatattaaatggatttacaagcctaaaaacttaaaaaaagataaattatatttttcatgcttaaaagtaataaatgataatttaaatgttaaatatagagaacctaaaataatacttcgtgataattatagttggcagtcttttattgaacatttaccttgtaaaaatgaggtaatgataaataattattattattctttgggaatacaagcgtgtcttttatttattttaaatgctaatgatatgcattttgaaaatctaattgctaatggagaatatccagtatttatagatttagaaactttattacaaactgatatagatttttcaaactctaatttagagcattatccttcaaatgataatgttttaaacaccttattgtttgatgtttctgataattcttcggttatggatcatattggcggatttactaatcgtaaaggcatgcccatttatgatattacaatgtttaataaagataatgatcaaatttctattgttgaaagtagcgagatatatactaaaagtacacctaatatcccattgaatgctaaaaaagagccagtagaaatttatgaaaaaaaagaaattttcttagagggatttaaaaatagctacaagactattcaaaataattttcataactttttaaatactttgaataaatatgaaaatctagagacaagaattgtattaagacctactactgtttatgcaaattatatagaatatttcaagcaaatggaaaatgaaagtgataacgaaatattagatattttatataatagtattccgttttataaaaagagtaagaaaatagcagaatatgaaattaatagtcttaaaaattttgatattccttactttaaagtaggattaaaatcaaaaaaacttacttcagtagatgataatttatatattaatgaattttttaaaaaaacaccttatgaaaaattagaacaaaaactttctcatttacataatgaagatttaaacagacaactctatttactgaaattgtctattgacgcatatagagagctgaatgattcaaaaaataatgaatgtcctaataaaagagaagtggacactactattcaacatgaaatagaacttattgagaagtatctagatactcaagatactgtttttaacatagagttaaatattgaaggaaaaacagctgtaacacctatttcttataatttatattttggtttaagtggggtatccctactatacttgcaatatcaaaaaactgctaataactatttttatagttcggttttcaatggtttatatgattcaatatatacaatgtggaaattagataaatcgaataactactctatatatcatggacgattttcttattttaagtatgtatatctattaaataactttttcaattttcaaatagatataaatattgaactacaaaaaactttaaaagactatatatcttatatcgaagataataaaagttatactatagattatttaggtggtttgagcggtattatctccttattattagatttttacaaaagtaacgataatcattcatatttaaaaaaagatattattttcttaacaaaaaagcttatagaaaatatttctataaaaaataatgaaatcgtagtgaagagcgatataactaatggttcaatgaaagctggtttggcacatggaacatccggaataatatttgcattagcaaaatatcaaactgaatttcatgatgacaaattaagtgatataatagaaagaatgataagtatagaaaataatgaattagctttgatcaaaaacaatgcttggtgtaatggcctgtctggaattgttctttcacgaaatattattcagaattatggaattagtaacgaattattaaatattgtatcgttaaaatctcagttattaaatggttttccaataggagtagaatcagtatgtcatggttctagtggtaattctttaattttgaaaactatgaatatcaacaaaaataaccaacatatactgtcttatgaatggacatccgggtatttattccccaatgaaaacataagcttcttcatgggtatatctggccaattgtttaatttactaaccacttcaaaagataaagatttaattgaaaaattattaatttaa

SEQ ID NO: 22 - DNA, 1302 bp, Staphylococcus hominis
gtgctaattcttactaaaaataacacagaaataaaaaattgtgtatatacaataacatgtaataataaaaaaacttatttagagtgcatacaattttctttaagaaataaattaagaatactttgtaaaataaatgaaatatatacatttcaaatttttggaattattccaagaaattataatatttatttaaaaagagctggagctgttatatccacatcttttaagaaaatacaaccactatcttcctctaaaaattatgtcgatgaatatactaatccaaaaaaaattcaatgggatgtcattagaacaacaaataattatgaatctcatagaaaagctaaaggaagccactcccatagtgttggaataatagactctgggattgatattaatcaccaggatttagtagataatattttatctatcagaaactttgttcctcaccaatttcctaatcaagatggtgagtttaaagtggatcctctttatatgaaagactatttagatcatggtacgcaagtagctggtcaaatatgtgcaaatggtgaaataactagtattgctcctaatactggtataaaaatatatagggtttttggagaaagagaaggttataatatttggattatagatgcaattattcacgctgcaaatgatggagtagacgttataaatttaagtttaggaagttatttgctagatggtgattacaaaaaaaaaggggagtggaataataataattctgaaattattgcctttaaaaaagctattacttatgcataccaaaaaggatgtgtagttgtaggttcattaggaaatgacagtataaatattgacgatcaaaagattttagcttcagaaatcgtaaataaaaaagacatttctgatatacaaaaaaaatctcaaatatatgattttccttgccagatacctaatgtatttggagttgctgcagcaaattattttgataaaatctcttcttactctaataaaagtaatttaaatttagatatacttagttatgctggcgattatagcttacttgaaaaatatggaagaaaggaatggttaaacaaaaaatatattactaaagattggatattaagtacatctagtgaaactgtttatacatatacaaccggaaactccttagctactgcaaaagtttcagcagctatagctgcaatgaatgattattataatattgaaaagcagccttcaaaaagtatatctttaataaaaagtaaatctaataaaattcttaatatgtctaatctagtttcgtctgatttaagataa

SEQ ID NO: 23 - DNA, 1728 bp, Staphylococcus hominis
atgtataataattatctacattttctatttactaagattaaaatccctaaaatgcagttattcatatcaatactaatatctactttaggcgctcttagtggtttaatgatacctttatttgctggaaaatttatagattctttttccttaaaaacaattaataaagatatgattatatacttattaatattatttatagttaacggtattttaatgggtttggggaattactttatgggtgtagtaggtgaaaaaataaattattctattaaaacagtattctttgataaaataattagactaaaattgccatttttcgatcaaaatgatactgggcaacttataagtaggatggttgatgacacatctataattaatgattttttatctaataaattacctactatttttccttctgttcttactttcgtaggggccatatttttcttattagttatagattggcaaatgacagttatttctttacttacaatgctaacttttattttatttattgttcctataggaagaatagttcataacatttcattgaaaacacagaatgaaattgctaactttagtactttattaaataaaatatttactgaaattagattggtaaaaacttctaatacagagcgtaaagaaacaaaaaatgctaatacaattttaaataatttatatagcttaggtgttaaagaagttattgttgaatcaataataaatcctatatctagtcttattatgttgcttacaattggtatcatattaagtgttggagggattcgtgtatctttaggcatcattacttctggtgaacttatagctatgattttttacgttttccaattatctaatccaataaatgaaatacttactttttttactgattataaaaaaactagcggagcaagtaatcgtatttatgaaatattccaagaagaagaagaagatatttacaattccttagaacataaaactttagataataatagtttgacatttgaaaatgtttcattcacttataataatgtttctattttaaataatattagttttaatatacctaagaatcaacttacagctattgtaggtccttcaggttctggaaaaactacgattttgaatattattgaaagattatatcctatacaatctggaaatatttattatggtaataaatctatatttgagataccactaagtacttggagacgaaatataggatatgtaatgcaagacaaccctatgatgaataaaagtattaaatacaatttattgtatagtacatcgaagtctttaactaatcatgaaatcataaattatactaagatgacagatagttatgatttcattataaacactatcaagggatttgatactattattggagagcgtggcattaaattatctggtggacaacgtcaaaggttagatttaacacgtaatttaattaaaaatcctcctctatttttattcgatgaagcaacatcaaacttagatagtgaaagtgaacagaaaatacaaaatgctatcgataatttgaatggaaaaaaaacgatagtaattgttgctcatagattatctacaatcaaaaaagcacatcaaattatttttgttgaaaataataaaattaccggtattggaacacataaaaaattattagaaaaacatgataagtatcgtatgtttgtaaatacacaaaatttatccaatttaaattcttaa

SEQ ID NO: 24 - DNA, 828 bp, Staphylococcus hominis
atgttgaagattgacagtctatcagttaatttgaaaaataataatattcttaaagacataaattataaatttatagaaaataccgtttatggacttttaggaccaaatggtgccggaaaaacaacattatttaaatctatcttagaagtaattgattattctggaaagatagagttccaaaaaaataaaaacattggtcacttaattgattaccctgctttttatgccaatctaacatgtgaagaaaatttaatattacatgctaggtatcttggtattaatacattacatatagataaattattatcaatagtaaatttaaatagtgcaagaaataaaaaatttaaaaatttatcaatgggaatgaaacaaagattaggtatagctaaaacattaattggtaattctaacttaatattattagatgaaccttcaaacggtttagatcctatgggaataaaagatataagagatataataattagtgaaattaaaaacgaaaaaagggttactatagtttctagtcatattttaagagaattatcagagtttactgatgtttttctttttattcaaaatggaaagctgatagctcatttgagaaataataaaagacattatagtcttgtggaaataaatgataggacaaataatttggattttaaaattaataatgaatattcaattataaaaagtagtggccgtttttatattttaggagattataatgagctagttaaatattacaataatgctaaaaaaatgactttagaagaagtatatttaaaaattatgagtatgaaggtagaggaggcttatttaaaatga

SEQ ID NO: 25 - DNA, 723 bp, Staphylococcus hominis
atgataacttttataaaaaatgaaattattaaaattagaagtgaaagatttataataattgtttttttattaagtttactaccttttattatgaatattgctaatttttttattaataataaagatttatcgttaattgatggtttttattttagattttataatcaatatttcatgataacgcctatagctataggtattattggatcatctatattctatatagaatttaaaaaccatactttattaaactggctttcttattccaaaaataagtataaattgtttttttcaaaatttttagtatcttttttatattgtacttttctctatttattaaatttaattttattattattattctattttatttttgacggtttgtctgaatctttagtaatgattattattagttttacagtccttaacttactcttaacaactttcctaatacctctatctattactctagttactatattcaataattatattgtctcattagttataactataggtattacgatggtatctctgattcttataccagcaccattttctaatttgatacctaccactttgagttatagagttggtttagatattatagattcatctatgggatttgaaagttcaaatgatataatagtaggtataatgttacttattataatatcaataatatttatttttacaggagtacgtaatttaaagattaggtaa

SEQ ID NO: 26 - DNA, 2055 bp, Staphylococcus hominis
atggttaaacgtattgattttcatattcataccgtatctagtaataaagattatgattttacatattcttctgattggattaaaagatatgttgaagaagctgaattagatgctatagcaattactaatcatgacttatttgatttagaaaattttaaaaaagtaaaagaagatctacccgatattacagtttttcctggcattgaattaagcttagaagaaggacatgtaaatattatattttcagaagaggacattgaaaaccttgttaacttctctaactggttatctaaaaatgaattagaaataagagacacgataagtaccgaagatttttgtaataacatggtaaattgggagaatggcatatatatttttgaaatgggaaaaagtaattcattgtcagtacctgaaaaattatcaaattcttctattacaatagctggtggggtagcaaatcaattaaaattccagtctatttacaatcaagaaaatatgttaatacctcttttgtttagtgatgcacatgctgcagatgatgaccccgagcccaaaagaaaaaacattcatttattaaaaatgaaaaatacttttttacaaattgataattgtacattttctgaaatcaaaaattgtataaagaataaaaaagcgatccatattaacgaaaaaaatttaagagatgttatagaaattaataatcatatggtttccacaggtatgaatttaatagttggtaaaaggggaactggaaaaacagaatttttaaaaaatataaaaaagcaatatgatgatgatgaatactatgaaattgctcaattcgaaacagctagagcagacgagtatatagaaaaacaaagaaaagaacaaggacaatttgcatttgatatttggaaaagaaaatatgaatctcaatttcggacaataatagagtatttaaacagagatgaaaatgaatttgatggcgtggttgaaaagtatttagaaagtgttaaaaattttgctaaagataataatttaagtaattcaaaagaaaaatatctactacataaagaatcaaagtttgataaaatacctactgctaatttagaaaaatatttaacagatttaaaaagtcttattcaaagtaatgaattttggtccttattgaaaaatccaaatgaaaagaaacaagtatttatcgaaacatataatgaactcagaatcttatatattgaaaagcaacaagaaaataaaattaaagaaagagttaatgaaatactagaatctgttaaaaaattagtccaatcaagaacaggagttacaacagtattagattgtgaattctctgaaataattcaaaagcagcagatggaaaaacaaataaatacttttatgaaaaacataatttgtgaacaagagcttaaaagagaaaacgtttatgggtatcaaatcattgttaaaatatctcctttcgagaacgcttcacaatttcaaagtgtcgcatccaccagagaagctgtgaatgatgaaattataaaaccatatctacaaagtgattacatcacttttttaaataacttaaaaaagaaaaaattttataaaacatctgatttagcaaattattttataaatttaactgttgaattattagattcagatggaacccctgcttctggaggccaagcagttggttttgcattaatgatgagactcgaagaatctaaaaataaacctatcattcttattgatgaacctgaagcttcgcttgacaacgcctatattcgtgacgaattaataccggcattaaacaatttatccagagagagtactgtttttgtagttactcataattctacattaggagcgttaatcaatcctgattacctaatagtaacaactaaagatcaaaacaataattataaagtactcactggagaattttcttcaaactctatatccaataatttaggcgtttcagagtctagttataataagtttgtagaagctatggaatcaggaattgaaacttacagaaaaaaaggagaaacttatgaaaatcttagaaataaataa

SEQ ID NO: 27 - DNA, 21 bp, Artificial Sequence
  universal primers, Uni-F
agagtttgatcctggctcagg

SEQ ID NO: 28 - DNA, 20 bp, Artificial Sequence
  universal primers, UniR
acggcaaccttgttacgagt

SEQ ID NO: 29 - DNA, 20 bp, Artificial Sequence
  degenerate primer for amplification of the dnaJ gene (forward)
gccaaaagagactattatga

SEQ ID NO: 30 - DNA, 22 bp, Artificial Sequence
  degenerate primer for amplification of the dnaJ gene (reverse)
attgyttaccygtttgtgtacc

SEQ ID NO: 31 - protein, 66 aa, Staphylococcus hominis
MSNKDLELFNTAGDLIQELKDGDLNIHLYGESEIRKKSFSQKTGNDGKHCTITWECSICPTKTCWC

SEQ ID NO: 32 - protein, 54 aa, Staphylococcus hominis
LKQNSRITLDELNKITMGTSEVRKGKGGGFSTVTVVTPIVPTSKCASIVKPCNK

SEQ ID NO: 33 - protein, 54 aa, Staphylococcus hominis
MTKITKDDLKKITENRIEARTHPTVVPVSAAVCGVATKLVPTSKCASIVKPCNK

SEQ ID NO: 34 - DNA, 198 bp, Staphylococcus hominis
atgagtaataaagatttagaattatttaatacagccggtgatttaatacaagaattaaaagatggtgacctaaatatccatttatatggtgaatcggaaattagaaaaaaatctttctctcaaaaaacagggaatgatgggaaacattgtacaattacttgggaatgttctatatgtcctactaaaacttgttggtgc

SEQ ID NO: 35 - DNA, 165 bp, Staphylococcus hominis
ttgaaacaaaatagtagaattactttagatgaattaaacaaaattactatgggaacttcagaggtaagaaaaggaaaaggaggcggttttagtaccgtaaccgttgtaacaccaattgtaccgacatcgaagtgtgcctcaattgtaaaaccatgtaacaaataa

SEQ ID NO: 36 - DNA, 165 bp, Staphylococcus hominis
atgactaaaataactaaagatgatttgaaaaagattacagaaaatcgtattgaagcacgtacacatccaaccgttgttcctgtaagtgctgctgtatgcggagttgctactaaattagtaccaacatcgaaatgtgcttcaattgtaaaaccatgtaataaataa

SEQ ID NO: 37 - DNA, 2390615 bp, Staphylococcus hominis
  misc_feature (291398)..(291497): n is a, c, g, or t
  misc_feature (301619)..(301718): n is a, c, g, or t
  misc_feature (920782)..(920881): n is a, c, g, or t
  misc_feature (1025989)..(1026088): n is a, c, g, or t
  misc_feature (1028753)..(1028852): n is a, c, g, or t
  misc_feature (1031979)..(1032078): n is a, c, g, or t
  misc_feature (1096869)..(1096968): n is a, c, g, or t
  misc_feature (2084798)..(2084897): n is a, c, g, or t
  misc_feature (2117498)..(2117597): n is a, c, g, or t
  misc_feature (2210485)..(2210584): n is a, c, g, or t
  misc_feature (2212249)..(2212348): n is a, c, g, or t
tcgaaccatgcggttcgaaatattatccggtattagctccggtttcccgaagttatcccagtcttataggtaggttacccacgtgttactcacccgtccgccgctaacgtcaaaggagcaagctccttatctgttcgctcgacttgcatgtattaggcacgccgccagcgttcatcctgagccaggatcaaactctccataaaaatttatgatgtttgattagctcatcatactaaatagtgtttgtaacatttaagttactttattggaattaacgttgacatattgtcattcagttttcaatgttcattttcttcaacacaagaattaattatactcgctatcgatatgaaagtcaacaacttttttaattaatttttttgtgtttttaatgttcgttgatttgtttcgctcaacaaatacatactatacagggtttctttcaaatgtacaatggtaaaaattacactacaaagggtaagagatagactctaatccacaaaatacgaatattatataaaataatttgttaatagttaatattaagtatgttttgtttcagtttacagctttttttacattgctcttctcctataaaacaaacttttaaaaatttacatttttttaaaataattttaaaaaaagctatttacagtgtgatttagtattgttgaaggtaaaatatcctcgttattcaatactaatctactataaatagcacataaaaatttacatttcggttctaccagcaattgctttagaaagcgttacttcatcagcatactctaaatcgccaccaactgataacccttgtgcaaggcgtgttacctttattccaataggttttacaagtcttgaaatatacatggcggtcgattcaccttctaagtttggattcatagctaatataagttctttaacttcttcatcttttaatctatcaataagtgtaggtatattgatatcttcaggtcctataccatccattggagagatagatccatgtaatacatgataaaggcctttatactctctcattttttccattgcaataacatctttatcatcttcaaccacacaaataattgaacgatccctttgtttatcttcacaaatataacacggatctttttcagtaatatgaccgcaaatactacaataggtaagttctcgcttaacatctactaaggctttagcaaattttacgacatcgtcttctttcatgtctaatgtataaaaagccagacgttgagccgtcttgggaccaatgcctggcagtttcataaaactatctataagttttgaaatcggttcaggataatgcatacttaacctacattcctggaatatttaagccttgagtatgtttacctaatcgttcttgtgttaaattatctgctttattcattgcttcatttgttgcagctaaaactaaatcttgtaacatttcgatatcatctggatctactgcttcttctttaatttctacatctacaacttctttatgaccagttacagttacagcaaccataccgccaccagctgttcctacaatacgttcgtctttaagtttttcttgttcttgtgccattttcttttgcattttttgcatttgtttcatcatttgttgcatatttccgccaccgcgcataattcatttcctccttaaattttcacattaattttattataatttatattttattatacatacgtttatatttattgtcatgtatgactcattcaacttactttgtaaacaaactgacctattttattattcatctataatattcacagtatcttcaccaaataaatctttcgctttttgagcgatatcagacatttcctctttagtattatcttttgtactttcagaagaatgatgatcattttgttttctatgattaatatactcgcttcttactctcatccattgatctgaagggacacctactacttcaacatttttatctatgatattacaaacgacgttttcaatgtttttccttttttcttcatctttattaacaatttcacaatgtatttcttcatcaaattgaattaatacacgttttctacttgctgctactggaattgagttttgcaataagctgactaaagattttttatcattacttttagcataatcaatgacttcttgccaatgttctttgagtagttgaatatcttctttatttgcttcatctaacactttagctatctgagtcatagaaaatgctgctttactttgacgtttacttctagaatgtgtgtttgtttgtgtgtgcttattattactctgtgaaataccttgtgcttttagagtttttaactcattttcaagttgttccattctttgtaataacacttcattattaggttctgtagcaacaggagttgttgctacattttctactttcgtaggatttgtttttaccatttcagctaatttaactaataagacttcaaagtgtacattctgattcacactaaatctaatagaaacgagcgtatcatttataatatctatcatataatataacgtttctaaatcaaattgagttaaggcatcgtaacttgtttgttcattgatggttttattcataattgtatctcttacgaaataaatcatatcattaataagtctatttacttctttaccttcagatacaaagtgatgataacgagaaaatgcttcttttacatttccattaacgatatcgttaaacaattcattaagcgacgcttcatctacactacccgttacgtctaatacatcttgtaatgtaagatgctcatcaccaaaagcaattgcttggtccataatgcttaatgcatcacgcataccaccttctgatgctttagcaataaattctaatgccgcttcctcataatctagtgattgttcttgtgcaacaaaacgtaatcgttccacaatctgttccgtactaatcgctttaaaatcaaaacgttgtgcacgtgaaataatcgtaggtggtattttatgcggttctgttgttgctaaaataaaaatagcgtgtgctgggggttcttctaatgtttttaataaagcattaaaagcacctgttgtaagcatatgaacttcatctataatataaactttatattttgattcactaggtgcgtatttaactttatctctaatatttctaatttcatcaacaccgttattacttgcagcatcaatttcaataacgtcaccatttgttccttgtgtaatgcctttacatattgcacactcattacaaggttcaccatcatggggatttaaacagttaatagctttagcaaacactttagctatacttgttttaccagttcctcttggcccactaaaaatatatgcatgagattgctttccttttgaaatagcatttctcaaagttttagtgacatgttcttgacctacaacatcactaaaactttgaggtctaaacattcgatataaagcttgatagttcacagtcgcacctccaatacaattacttatcaattatatcatgccatatctttgatatattaattttttatacttctatgatatcggttctagtttcccatgtggatattcacttaattgatcccacaagaatttcacataaagaggcttatcatcatttttcgatataatatgatgttgcgccgctgatgcataacctaacgttgtaaaataatcaggacaaccatctacaataatagcagtataatgatgagctttcgcacgctcttctacagcttgtactaaagcttttcctataccttggtttcgataaggtgttgctacaatcaaagaagataattgtaatactttaaatgtatcttcattatcaatgagattcacttcatttagcatgatgtgccctataatgtccccatcttcttttttggcaataacttctaattcataattatatgtaggttgttttcttaaattagaaattattttactatgtgatttaccatctaaaccttcgttattagtataatgttgttcaagtttttctaaagtctcgatataatccatttcagttaaagtacttaaataaacttgcataacttccccctatattaacatgttcctaatcatatttctgttaaatgaagtaaagtgaatgtatcagtgtatacacccatgaccctcattataaaaataatttagggcatttttttctcaaaatgcttattttgaatatctgtatataagtatgatgtttatagttgttcgatgccaacttatttaaatgatttaagagtctttatcagtattctaagttcttctatagtttatataaaaaaggagtgactttaaattaaagtcactcgtaacgtatatctatttatagaaatgattaattttaaattaaataaccgtgcaccttcgaatcgaatgtacatcataaacgttaccgaagtcgatagctaaatctcggctaccctacggcacatatgagtgtccacttaatgctgcttccgtcaggacctgacatgattcatgggttcatattgcataggaccgaaatcttcaaacacctcgtgcttcgggcagacttcacaaaagtacaccctcaacgaaggaattaagtctcgcataaagcggatttcgagtacagggaaccgctacctccccacctagcacggtaagttttataatactataaaacgtattaacgttgcaagtaaaatagtatatttatttataaatcattcaagttaaaaacaaattcaaaaatattactatttattttgtcgacgagaaaattcattaaacttaaactctgtcgctaaatgctttgaaacattatattgaaatcgcgtcgtatctttaagaaaaacggtacttcttactgtcgctgtatatggatggtgcactttaccaaacacttgatattcaaaatccttaaatggttcaaatgtaattgatttattggaatagctaatatttaaatgaagttctttttctaaataatcataaatagactttctagctatctcattagatattttaggaactaatgatgttagaaaataatcttcatctaatattttaacttttccatccacacttctacttcttactacatgacataataaatcgttatttcttaaacacaattgttctttcactaaaggaacatcagacgcctttattatttcatttacaagtacatgtgtttcatgagttaagtttaacttttctttaacttctttaaagctaattaaatctgaaaaaggaaattcagtgatatcttgttgaataactatcgatccttttcctttaattttttgaatcatcccatcatttgcaagtaattcaagtgcttttcttaccgtttctcgagatgagtgatacgtttctacaagctcacgttctgacggtagttgttcaccatgtaagtatattccctcagaaatatctttttttaatttttcataaattactgcaaatttttgttgacccatttttaatttttcaccctatcatttatatgacttactaacaactatcgcaccatatggtgaaatcttattgtcaagaattgtaccactttgaataataatatctcctactatatcaagatcatctggaatcctaacagtttcatttgaaaagttagcaataattaaccaagaatcatttttatagttgcgacgataaataaacaattgtggatgatccatatacaatggttcaatatctccataagtaataatatcataatgatgacgtaacttaataagttgacgatatacatgtaaaactgaatctttattacttatagcatcttcaacattaatcgcatctatattattaggtaaatctatccatggcgtaccagatgtaaaccctgcattttcattttgattccattgtataggagtgcgtgaattatcacgcgatttttgggataaaatggtcaagatttcttcttctggtattccttcttcttttagatgtgtatacgcattacgagattctacatctctatatttttgtattgatgtataatgagggtcagtcatgccaatttcttcaccttgataaatatagggtgtcccttgtaacatatgtaacgcaatagctaacatttttgcgcttgcttgacgattcaattcatttgtatcatcgccaaatcgtgatactactcttggttggtcatgattacaccaaaaaatagcattccagccaccaccattatggatacctacttgccattccattaaaattttctttaatttaagaaaatcatatttttcatttgtccacttttcaccatctttataatccacttttaaatgatgaaaattaaatacactattcaactcttgacgctcaggacgtgtatatttaatacaattgtcaatcgtcgttgaagacatctcacctactgtcatcatatttctatttccaaaagtatgacggttgagttcatgtaaatattggtgaacacgggggccatcagtgtaaaattcttttccgatagcttccgaatttttaaattcatctttagaaataagatttattacgtcaaaacggaagccatcaacgccaaattgaatccaataatttaccatttcataaagtgcttgtcttactttttcattatcccaattcaaatcagcttgtgtcacatcaaataagtgtagatagtattcatctgatttctcatcatatttccaagcatttccaccaaatttagattgccaatttgttggtggtccatctgctgatgatttgaaaaaataaaaatctcgataaggattatcttttgaacgaattgcttccttaaaccaatgatgttccgtagacgtatgattaattacaatgtctagcataacttttaagtctcgacgatgtgcttcataaatcaattttttaaaatcatctaacgttccaaactcttcattaattttaaaataatcactgatatcgtaaccattatcattcattggagattcataaataggtgtaagccaaatatagtccacgcctaaatactttatgtaatctaatttttcaataataccattcaaatctcctttaccgtttccagtcgtatcattaaaagatttagggtaaatttgatacactactgattttctccaatcgttttgaatcatatgaatgccacctttatctaaaaatatattcttcaaaataattaattattcacatcttataatgaaagttcttaagtctcattttatatcatccggattttctaccatttctttagctttaactttagtgaatttagaaaaaaccactgttaatactgctggcaaaatcattgctaataggataacaggtatataaatataccaatatttactttggattgaaataaaagctggaacgcctcctacccctacattaccaagtactcggtttgctccaatgactgcccctaaaatacccgatgtacaaatagcagcaaaaaacggtacttttaaaggtaaattcactccaaacatagctggttcagtgacacctaagaaagcagaaacgccagatgttaatgctaatccttcttcttttgccatttttcgacgtttataaattaaccatgcaccaaatgcagctgatccttgacaaatattagaaatggctacaattggccataaataagttccctttaaagaactgcccatcaattgaaaatccactgctaagaacatatggtgtaatccagtaataacaagtggtgcatagaagaaaccataaattgcgccccctaaccaacccgcatgttcaaaaataaattgtatagcacctgtaatcgctgttccgatacctaatgctataggcccaataataataaatgataggaatcctgtaattaataatgccacaggccctactacaagcatcttaattgaatcatgcacgactttattaagtgctttttcaattaaagaaagtacataagccgcgataagtaccggaaggacttgcccttggtaatttagttgtttaatttctaaaccaaataaattccatgtaggaatttggcccttagctatatcatattgtgaaacaagttgaggatgcattaatatcaaccccaacactaatcctaaaattggactacctccaaagactttcatactactccaaccaattaaagctggtaaaaagataaatgctgtactagctatgacattaataatattagaaatatcacctaattgatgatgttgttccactaaggccttaggaccaaataaatgttccatagttaaaagattattaatccccataagtaaaccagctgttactagtgctggcaaaattggaataaaaatatctcctaataattttactaatcgttgtaatggattccctttttttgcagcggcagtttttgcttcatctttagatgcagtttctacaccggtttcatttacaaactgtttatacacttcatctactgtaccaggaccaataacaatttgatattgattgtcagctttaaattggcctttaacaagcgtattattagataaagcttccttatctactttattatcatctttcaaaactaatcgtaatcgcgttacacaatgagtagcagtatctacgttttcttttccacctattgcttgaacaatatcttgtacatcttttctttttacactcacgatgtccactcctttgtttctaacttaaacaaagtataacttgtctagacaagttgtgtaaaggctttcattaaataatttaattttttaaaatttagtacataaaaataagcactcagtaagttactgagtgcttatcttctttatattgattagtcttggattttaatgataatggcggaggaagagggattcgaacccccgcggcccgttaaggccctgtcggttttcaagaccgatcccttcagccggacttgggtattcctccaatgaacacaataaccatcatataatattattcattggaagtcaatctttttatattattatgctaaaactttttgtttgagatattgatctactgatttagctacagctcggccttctttaattgcccacacaactaaactttgtccacgacgtgcatctcctgcagcaaataccttttcttgatttgtacggtaatcatgctcatttgctacaattttattttgtttggttttaatatcaaatgatcgtggtactgttgtttcagttccttcaaatccgattgataataatactaaatctgctggccagtgtctttctgtaccatcaaccactaccataccttcaggtgtttcttctaaaatttgggtataaacaccgcgaatattacccatcgtatctacatcatatcgcatagtttgaacaccatatgcacgaggttctcttccaaatcgtgcttcatattctttatgagcataatccattttaaatacaggtaacgctaaaggccaagacgtgttactttcaaatgtaatctcttctggtgcttttgtatacttgttaaactgtacaatagatttacaattttcgcgtaaagctgttgctacgcagtctgctccagtatcccctgctcctataacaattacatttttatctttagccgtaattgaagcttcttcaatctcaccatttaaaacttgcatttgctcagtaaggtaatccatagcaaaatgaataccttgtcccattctaccttctaaaggtaagtcgcgtgctttttgagcaccagtacataatataatcgcatcaaattgttcttctaattcatcacgtgttatatctacaccgatattagtatttgtcttaaaagtaatacctgcctcacgcatgatttcaattctacgtcgaaccacagttttgtctaacttcatatttggaataccatacattaataaaccacctggttcagctgctctttcaaagacagtaacttgatagcctacatgatttaattcttccgccgctgctaatcctgcaggaccgcttccaacaattgccacgctctggtctttgtgttcttttggatattttggttttacccatccattgtcataagcttcatcaataatcgtgcgttcgatgcctttaattgctacagaatcacgattaattttcataacacatgattgctcgcatggtgcaggacaaatacgtcctgtaaattcaggaaaattatttgtctcacttagacgttcgtatgcttctttaaagtcttgatgataaactaaatcattccattcaggtatataatttcctattggacaaccaattgtttctcgtccgaaaggaagtcccgtttgacaaaatggcgttccacaatccatacatcttgccccttgaacagaggcttcttctctagaaaatcgttgttggaatgcttcgtgtccttctaaacgttcaatgagtgacaattctgctaatgattgtttctcatatttcataaaccctttaaactcacccataacttttccttcctttctttaataaatcacagctggttgcaagtctttttcaatcgatgtgcgatgatcataaaatgcagctaattttgcttcgttatcttctgataaatgacgacgttgtaactcaattttttgcatcattaattcataatcttttggaattacttttatgacatgttcagtgacattttcaaattgatttaagatatctttagcttttgtactttctgtataacgataatgttcttctaacattgatttaagtaactgcttttcttcatcatgttgcacacgtttaaatgctaatgttgaaagttgattcgcttttttaaatgcttcgatatcacttgggaagatgtaacttactccaccactcataccttggccaaagtttttgccaacatcaccaagtataactacgtgtccacctgtcatatattccaaaccatgatctccaattccttcaacaactacatcaacaccactattacgaatacagaaacgttctccagcactgccattaatataggctttaccactagaggctccatagaagcatacattacctgcaataatttcattttcacgagcatgctttggtgctttcacaacgactgttccaccagataatcctttccctacatagtcattggcatctccagtatgatgtattaatagtcccttaggagcaaatgcacctaaactttgcccagcatggcccatcgtttccgcaataatcgtttcttcaggtaaacctttactaccatgttgcttcgtaatataactacccgtaattacaccaacatttcgttgagtgttattaattgtatattgtcctttaaatgtttccccattttcaatactttgttttgcctctttatataaataatttaaatcgaatccaatatctaaatgatgattttgagctatttcttttgtgttcggtccatcaactgcatgaagtaatttctcaatatcaagtgatgcagctttagatttaggattaatatgacgagaacgttgtaataagtccgtacgtcctactagttcttcgactgttttcaagccaagttctgcgagaacttctcttaattcttcagcgatgaaatgcataaaattgacaacgtgatccgctttacctctataaagcgcacgtaaatctttattttgtgttgctattcctactggacaagtatcattatgacacactctcatcataatacacccgagaacaacaagaggtgcagttgcaaaaccaaattcttctgctcctaatgcacacgctaatgctacatctctacctgttaataacttaccgtctgtttctaaacgtacacgactacgtaaatcatttaactttaatgtttgatgtgtttctgctaaaccaatctcccatggtaatccggcatgttgaatacttgttttaggagatgcaccagtaccaccgtcataaccactgactacaattttatctgcaaatgctttagctacccctgaagcaatcgttcctatacctattttagatacgagtttaacagcaatatcagcatctttatttgcatttttcaaatcgtgaatcaattgcgctaaatcttcaattgaataaatatcatggtgtggtggtggcgaaataagcccaatacctggtgtagatccacgtgtttcagcaatccaaggatatactttagtgccaggaagttgtccaccttcaccaggttttgcaccttgagctactttaatttgtaattctttagcgtgttgtaaatactcactagttacaccaaatcgtcctgatgcaacttgtttaatcgcacttgataaataactgccatcttcttgaatgacatatcgtttaggattttctcctccttcaccgctattactttttcctcctaatttattcatcgcttttgctaaagtttgatgtgcttcctcagaaatagaaccataactcatagcacctgtgttaaagcgttttacaatcgattctacagattctacttgctcaataggaattgatgattgagatttaaattctagtaaatcacgtaaatggtcgtgtctattgtcatgcacagcattagtaaatgttttaaattgctcataatcattttcacgacaggcatgttgtaataaatgaatcgttgttggattaaatacatgatgttgaccttgttgacgccattggaagttactaccagaagctagatattcttcttcattactttgacgttttctattttcttcatcaatttgttcaatacttaatcctgataatttagattgcgtccctgtaaagtaagtatcaataacattttgagataagcctactgcttcaaatatttgtgcaccatgataactttgaacggtagaaatacccattttagccataactttaataacgccttctgataaaacatttgtatatgtttcaacattttcagaaattgaaccttcaagatggtgactatcagttaaatgagcaatcgtttgttgtgctaagtatggaatgactgcattagcaccatatccaagtaaacaagcaacatgatgcacttcacgtgtttcacctgataaagcaacaatacttgtactcatacgtaagtcttctttaataagtaattgatgaatatgacttacagctaataacattggcatagcataatgtaacgactgagttgtattgattagtgcactatcatctaacactaaaattgtataaccttcttttgtagcttgaaccgcttcttctcctatatgatttagagcttcttcgagtgaaatatcttgatacagggtcgataaatgtttcacgttaaacttactttgttcaattttatctaattgatttaatgtaagaactggtttagtaagttgtatacgatctaagacattcggtactggatgaagtaaatttccttcactacctagataagataactcacttgttacaatcttttcacgataagcatcgataggtggattcgttacttgagcaaacagttgtttaaaatagttaaataatgattctggtcgttcattaagtactgcgagcggtgcatcataccccattgcaccaataggatctttttttcctaccaccaaatctgtcatatatttatgaatatcttccttagtgtagccaaactgcttttgtactttaaacagtgttgcttcatctaataattgacgttgatattgaacttcgtctaattctaaatcaatcttgtattgatcaatccaatctttataaggatatttatgtgcaatatgagttttaagttcgttattttcgatgactttattagagttaaaatcaacgagcaataatttcccaggattcaattgtcctttaaacgcaacgttttcttctggtacatcaatcacacccacttcagatgagaaaacaataaaattatctttagtgattgtatagcgtcctggtcgtaatccatttcgatcagttaatgcgccaattttatcgccattacagaatgaaatcattgttgggccatcccaaggttccattaaatagctataaaattcataaaatgcacgtacatgttcatcattggatttattatataaccatggttctggtataagtaacatcgccgcttcttcaggctccattgctaaacttaaaaactccaacgcgttatctacaatagctgagtcgcttccatcttcatcaacaatattttgaattttttcactttcatgaccaaataaagtattaatcagttgacgctgacgggcacgcatccagttaacattacctttaatcgtattaatttctccgttatgcataagaagtcgattaggatgtgcacgtttccaactagggaacgtattcgtactaaatctagaatgaacaagtcctaattttgattgataatcctcattatttaagtctaggtataacgtcttgatttgatctgaacgtaaccaccctttatagacaatcgttttatgagacaaacttgtaaaatataattctaaatgctcgcgttctgcatattgttcaatttgtttacgtgctaaataaagctgtttaacaggcgtttcgtgttggtttaaatctacaaatacttgttgtacataaggcattgtagaagcaacatgttctgctaatgcttgtgtgtctacaggtacatctctataaccaattactttcaatccttcatcgttaaagtattgattaaatacaatttcatgctgtgtatctaaaactttttgattagagaaaaaaaggcctaccgcatattcgccttcattaggtaagtcgaaatgagtatgttttttaaaaaattcgaagggaatttctgtcataattcctgcgccatcaccagtaataccatcagctccaataccgcctcgatggtctaatctacgcaacatttctaatgacttttcaataatatcgtgagatcttaaattatccatattggcataaaaaccgattccacatgcatcatgttcctcacggtaatcatataatcctctttttagtttatctttaaacacgatgcccactccttttgagaattttcagaaaatttactgttaataataattaatataatgtaaaatatttatctgaacaatatattaaatagatgatatcattctaataattagaatattttacgatatacttatattaaggaggtaaaatatggaaattaaacaattacgatactttgttgaagtcgctcgccgtgaacatatttctgaggctgcattggaacttaatattgctcaatctgcaattagtcgccaaatcaatttacttgaaaaagaattacaagttccattatttgatagacaaggtcgcaatatatatcttacttcgcacggtaaagcgttactcacacaagcaactcacatactagaacaacttgatgaaacagtggctctttttcaacaagaacaacttaaaaacgctcatcatatcaatttaggttttgaagaaagctatgcttctcatatgattacgcctattattcaaacgtttgaaagagaatacgatagtcacattatacctagtttaatgaatcatactcagatagtagactatttaaattcaggaaaaattgatatagctattgttgagaatacacctgaactacaagcaaactcaactttttcaattacatctttatatgaagaaacatatcacttatatgtacctaaagacgatgctattgccttaacatttaatccacccttaacacaacttaaacaatttgaaaaaaatcctttatatacacttcacgttttgcctgattctattaaaaaacgattagaatctgtaattaaagtacctatatacacactaggtacaacgtctcttggtcagtatctattaaaacaacgtcgtggccatctactcttacctgattatatatcgttggatcattcatctgaacaagtagaggatatctctttagcacatacagaattaaaacgttcattttgtgtggtatttaaaaaagacaataaaaaagtagatatctttaatctatttcatctcattcaaacattgctaagtaaagtttcaacatatcactaggtcttgtaacgaacactaacccataacatatgaattgaatatcattttgaacacgcgtataatcactttattgcgataaagggtaaattatataattaaaaagaggattatatttaatgaatataaagagacttcacatacctaaaattaaaaacactcatcgtctaattattattgttactttaataatgattggattatttatttttacattttttaatgcttcattttatcaaatacctattggtaaaatcacgaatgtcgaaacaagtcatggtcaaaaagtcacagacgagcatcataatactgacacaacatataatcaacgattaactatacgcattctaaacggtaaatataaaaacgatatcacaactgttaataatcattttgtaacatctcaagcagattcagagcaattttctaaaaatgaaaaagtattgttacatatacaaaaaagtccatctgatgctactattctagaaaaaaaacgcgatggccttactgtggcgattgtaggcgtatttatcgtgacacttttaattgtaggcaaaaatgtagggttacaatcaattctatctctactatttaacactgcgtttattattgtttcaatagtcattcataatactttttcaggtacaaatttatttttattaatgagtatagccattattttatcaactattattacattagtattagtaactggctggcaaaaacgaacttgggttacgataattgctactttatctggaacatttttatgtgtagggattactgaattattaattcaatttacaggtggtaatggaatcaaatatgaaacaatgagttttttaacgctacctccaaaagatgtctttatgtcttctgttcttataggaacattaggagcggtaatggatgtagcaattacaatttctagtggaatgtacgaaattctccagcgtacgcctaacatttcaatgtctcgttgggctttagctggacgtcatattggccaagatattatgggcaccatgaccaatattttattattttcatatttatcaggtagtctagccatggtattaatttacttaaaaaatgcgaatacatttacttacactatatctatgaactggtctctagaaattacacgtgcactgactggtggtatcggtattgtattgaccattcctataacaataggacttatggtcactatatttaagtggaaaggagtaagccgatgactacaatttttttactcgcactattactttttattttaatgattttgcttggcggtaaaaaaggactcatctcctatctcactttatttttaaattttattattcttattattagtattgttttcattctgtttggcatgccaatctatcttgtagcctttaccttttgtcttgtaattgctgcttgtaacctctttattttaaatagttacaatattaaaacacaagccgcatttatcggaactatagtaacaaccgtccttcttatcataggtgtctatttatctgtaaaatttggacatctacaaggttttgctacagaacaacaagatgaaacctatatattttcaatgaatattgatattaatatgctacaattttctgtttttactattatgttggctgtcatcgctgctgtaatagatttaacgattacaataagttcaccaatgtatgagttgaatgaaacaaaccctgatctttctcgtaaagaattatttcaatctggtatgcgtgttggcagagaaattcttgctacttccgctaatacaatttatttagcttattttggtggacaattaacattattcttttggttttttcaacttcattattcatttgggcatattttaaattctaaaatttttgctcaagagtttatctccatcttactaggtggcattgcagtcgcgttaagtattcctatcacggcttgggttagtgctcggttaattaaatatcatcaacttaaacaaacagatgaccacactactacttcatccttaaacgaagaaatagaatagtaaagaccaaacagtggcatttaatgattgaaagcatccaatgtcactgttttatttattcaatatttatattgaaaatgtttcgatccacttaatgacagctggtgcgatatattgtgtatcggatttattgaaccagcgaatatcagtaacttcattatcaatttgaacgtcattccaattaatacgttgattaactttaaatccatttaattcggtcaaagtatttggttgaggataggcttcaccaatcacttttccaatatatgtaaaatcttcttgagaaaaataaagttgtagttcttcttcaatttccctttgaatagcttctaaaagcgtctcaccttcatcaattttcccaccaggaaaataatatttttctctgtgacgaacttgtaccagtaaaatttggtcctctgtttcttccactaaacatacacatttaatcattctattcatccttattaaaacattctcacttcaaaaaaataatttaatttagtatgatattaacatacattaaaacaaagtttagaacaaattcttaatgagtaatataacattcagatttgttttttatttttatggaggtcttgtatgatggcaaaacaatcaaaactttcacgcttatctagtttagtaagtacagcaggatttattgtggatggatataatggaattaaatatagtgccaaaaataaaaatctagtttatctatcactagcacttagcacagcggttactgtgttcgattttatagtttctatgagatccccacgtaaattccgtaaattcacatcatttatctcatttattgttaatgtgacacgcttagcttcaagctttagaaaagttaaagaagattatcacttcgaataaaaaaacgagcctaagacataatgaattgtcttaggcatttttaatatattgacagtcgatgactgaagtaaaaatacgctagtatcaagcttttttcaattttagttccagattcccaacataaagactttcaagaaaaaagtttatgtccaacgcaaattgggtatgcgttgccaagataggacgacggattcaaaatgaatgctgtccgactttctttgtttttttactaatgaataaatttatattgtctaacttgataagctggaattgtacgatatgtcaaaacccctggacctgcactaaaattcatttcagatactaaaagacttccattactattgacgcgttctacaaaagcaacatgtccatagtagccagcatctgattgggcaattgatcctacagtaggatgataatcaattctatagccatctcttgcagctgcattgtcccagttatttgcattccaccaatatgtactaatacctttaccgatttgagcacgacgattaaagacatgccatgtacattgaccccaatcatataaatttctatgattaaaaatcggtgtgtgataataataatttgatgatgaacttgtacgatttgtattactacttgatgatgctgtgccgcttacacgtaatttttgacccgggtaaataaagaaattatttaatccatttaaacgcataatattttgatatgtcgtattatatttccaagcgatgcccgataatgaatcaccgtaacgaacagtatagtagcttgaagaactagatgaatttgagctattttgtgtgtggctacttgaacgtgctgttcctgaaactgttaatgtttgacctggaaaaattaaaaagctatgaagtccatttaaatccataatatggcggtacgttgtaccatatcgactagcaattgatgataaactgtctccactttttactgtatatgtactgcttgagttattactataagaatgagatgaactagagcctgaaactgttaatacttgatttggaaaaataagatttgatgtcaaaccatttaatgattttaatttagctattgtaataccatagcgatttgaaatagaccataatgattccccactttttactgtgtgagttgttgctgcttctgcttgatgtgcaaatattgtactaagtgccccagttccaataattgctgttgcaagaacttttttattcataaataagcgcctccttaatcttatgcttatctttgatatgtccccatgacaattgttgtattaacgcttagttttattacgttaattctagtgctttaactttaattttttctactcaagtagtctacttatataaattaatatatttcattataatattccatttcaatttgattacataatgatgaaattttagtacgatacttataaaattaaaactttataaaaatcgatttctttagtctaattattgcataacgtaagtaagaatttttttaaatgtgattatatttaatcaaaaatttattatactattgaaaatgatataaaaaaagagcgggacagcattcatttttgaattagttgtcccactccaagagtcgaaaaaagcttgatctatgtgtatttttaattcattaatctacgacatatgctaaatgactaaacaacgattgatattctacaatgtttaacttactattttaagctatcttcaatgtctttaatttctttttgagataaatcgactgctttttcaccatctttagtgtcttttttcaatgcttcttgtgcttctttactatgatatagatctacaatttttttgtatgttttattatctttatcttttgagttaacggcaattaaattaatgtatggtttaactgcatctgaagtagaactttctaaataaattggatctttcttagcatctaagcctgctttcgttgctacaccattattgataactgaaatatcaacatcatctaatgcacgtgcagtttgttgagcatctacttctttaatttttaaatgtttagggttatctttaatatcttttgttgtaccacttaaaccaaagttatcttttaatttaataagtcctgctgattctaataattttaaagcacgcgcttggttagaaacatcattgggaatcatcacttgcgcgccatctttaacatctttaatatcttttacttttttagaatagatgcctaaaggtgctaatacggttgtactaattgcttcaatttttgcatctttatgtgcttttttatattcatttaagaaagcaaagtgttggaatgcattcatatcgatatctccatcacttaatgctttattaggtacgttataatctgaaaagtgcttaatttctaaatcaatatcatctttttttgctaattctttcactttttcccaagcagcagtatcatttgatgctacgccaactgttactttcttactatttcctccgcctgaacatgccgcaaggacaataatagatgctaataataaaccgattattctcttcattaaaaactgcctcccaatattaaaataatttatttaaataactaatttctgcgaattattctagaaataaagttacctaatgactgaataatttgtacgataataactagaactacaactgtaataataatgaccaatgtatcaaagcgttggtaaccataaacaagcgctaaatctccaataccaccgccacctacagcaccggccatagctgtactaccaattaaaccaataatcgctgtagtaatagctagtacaagtgaacctaatgcttcaggcaataaaaaatgacgaataatttgaagtggtgatgctcccatagcttttgctgcttcaataatgccatcatctacttctaaaagtgaattttctactaaacgcgcaatatatggtgctacatatactgtaagtggaacaattgcagctgttgtaccgattgacgtacctgcaactaatttagtaaaaggtacaattgcaattaataaaatgatgaatggaatagatcttaaaatattaataattggattaagaatttggtgaataacgacattaggccagactccatgttttcgagtgactacaagtaaaatacctaatgggataccaatcaatgcaccaataattaatgatactgttaccatataaagtgtttcatacaatgcttgcattaattgagatgaatctatgcttgaaccaaacatttaacgcacctcctcataatgaatatgtcgctcattaaaatatgattctaccgtgtcacgactaaattgtgcatcgtgttcaaagcgtaaccataaataacaaatcgtttcatcttgaatatctgacatagacgagaatagaatatttacattaaaaccatattggtttattaactcgttcattaatggataatcaatttgctttttatctaagaaaagtctgtaatctgtataatgattatctgctctttcaaatgaggcacgtaatgctttagaaggctctgtactaataactgttgatacaaaattttgtgctgttttcgttttcggatgactaaacacatcttttactgtaccaatttctacaacttccccgtgttccattacagctacacgattacagattttttgaatcacgctcatttcgtgagtaatcatcataatcgtaaccccaaatgtttcattcacatttttaagtaattgaagaatagaacttgttgtcgcagggtctaatgcacttgtcgcttcatcgcacaataatattttaggatttgttacaagtgctcttgcaattgcaacacgttgtttttgtcctccggaaagctcatctggaaattgatttttcttatctgcaagtcccacaaactctaacatttcttcaactttctctttaatctcagaattacttttgtgactaagtatcaatggcattgctacatttttaaaaactgttttagaatttaaaagattaaaatgttggaaaatcattcctatatctttttttacgttgcgaagttctttttcactatatgtattaatatcatgtccatctacaataacatggccctctgtagcttgttctaattggttaactaaacgtactagtgtacttttaccagcaccactataaccaatcacaccaaacacatcacgcgcatcaattttaaaagaaacatcttttaaagcgtggatggtttctcgtttctttcgaaatactttatttacaccctgaaattcaatcactatgttcacccttatctaattctgattaaattcgtatgatatgaagtataggcaaaagttgaggatgcgtcaatatagttttttaaaaaattgaaaatttcagatatttttagtattgaattactcttttagttccaaatatcataataaaaatacaagagtacaataaacatcgtttcaatttctattgcactcttgcattaatactttcactatattctatttatttagcgtatctatcgcttgttttaaatcttgtactaaatcttcagtgtcttcaataccgattgataatcgaactaaaccatctgtaattccttctttagcacgaacatctgctggaatagatgcatgtgtcatcaaagcaggtacagaaatcaagctttccactgcacctaagctttcagcaagcgtgaaatattgcgtttcacgaattaattgtttagctgcttctgtatctttcacttcaaatgcaacaacgccagtatgaccacttgcttgagcgatatgaatatcatgattaaggtgactttcaatactaggatggaacacttgttgtactgatggatgctcttgtaacatcttcacaataccttctacgttacgattaatttgttccatacgtaaccctagtgttttaattcctcgaattaataaataactatcttgtggtcctagtacgccacctgtagagttagaaataaatgctaagcgttcacctaattcatcattagatgtagcgactaaacctgcaacaacatcactgtgtccaccaatatattttgttgctgaatgtaatacaatatcgattccaaaatctaacggattttgatagtacggtgtcataaatgtattatcgactacagaaatgagatgattttctgtcgcaatttctgctgcacgtcgaatatctgtcacacgtaataaaggattagacggcgtttcgatatataacatttttgtttctgatttaatataatcttttacgttttcaatatttgtagtatcaacgaaatcaacatcaataccaaatcgtgtaaagacttttgttaaagcacgataagttccaccatacacatcagaatttaaaattaaatgatcacctttatctaataacattataacagcactaatcgcagccatacctgaaccaaatgcaaatccatgtttaccattttctaaattcgcaatgacgctttcaatagaagtacgtgttgggtttgcagtacgtgaatattcataaccctgtcttaaatcaccaatatcatcttgcaaataagtacttgtttgataaattggtgtcgttactgctccagtaaaatcatccgtcgtatgtccaccatgaatcatttgtgtttttttcttcattattattctcctttgtattcaaatattttttttgacatataacgatcactgccatctggaaaaattgttacaataatacctttatcaatgcgatttttaatatctaaagcaccttgtaatgctgcaccagatgagctaccaacaagtagtccttcttgtttagctaatcgttttacattttcaaatccttgagtatcactgactgtaataatatcatcaacgatagatttttctaaaaatactggccatttttcggagccaataccttcaatatcatgagcatgtgctttaccaccattcaatactgagccttcaggttcaacaataatatttttaacattaaattgttgtaaatgtttagctacaccagtaaatgttcctccagatccagcaccagctacaaaataatcaatgtgtggtaatgcctctgtaatttcttttccaagcgtatgcgtataggcttctggattatgttcagtttcaaactggttcatatatactgcatcatatttgtcagcataatgacgggcttctttttgtgcacccatcattcccttgtttttaggtgttcgttttatttcagcacccaatactcgcataattgaaattttttcttctgaaaatccttctggggcaaaaatcacacattttaaatgataacgattagcggccattgctaatccaattcctgtattaccagctgtagcttcaacgatggtatctccttttacaacacgtttttcttttagcgcagtttctacaagatatttccctagtcgatctttaatacttccaccaggattaaattgttctaacttcgcataaatttgtacatgttcatcactaaaactttctaataatactagtggcgtttgtcctattaaatcataagtaatcatatctttcgttcaatacactcaagtaatgtctgaacatacctactttctatcatcatattcatttccaatatttaattttaattcttactcaaccgctatgaattatacgctaacttatatcttattgcaaaaagctagtttctttatgtaaaatgtaattagttattgcttttaagtactcatgttatgataaaagtgaaccactggaaatgaattaaattttacgatgaatcaacgtacaaaggagactcgatgatgacatctaaagcagacttatctttatccgtctttactaaggatgactataaaaatttaaattataaaaatagtacttttagaaactcaatgtacgacgaaattgaagtaaataaaagccactttaaacattgtgattttagtgaaggcatttttaagaatgtaagcactatttcaaattcaaaaattatcaattgtaattttgataaaagtatcttcgaaaatgtaaattttttcaagacgcttattagtaaatcaaatttaactgttacctcatttgatgaaaatcattttaatacattaacgattgaacattccatttttaaaaatagcaatatacgtaatgtaaaatttgataacgtcacgtttaaaaaagtgatctttgaaaacgtcactatggatttgtgtcattttgaaaatgtaaaaataaaagattgtatatttaaacatgtcactattaataattcttcaattcctgaaaaattattaaaagaattacataaacaagatgttacgtttgaaaatatgtaattcaattatcattatgctaaacagagtctagaacaacaatttgtatcctagactctgtttattcttgttaatattaaaataattgaacaataaaaattaatataataataactggcataatatatttaattaaaatataccatggaacaaaaagtttaaatttatcttttccaaagctctcttttaatgcttgtttatctagtaattgacctacaactaatgtcgttcctaatgctcctaatggcatcaagatattcgagacgataaaatccatattatcaaaaattgtacccgctccaaacttaactccacttaaactgctaaatgatagtgttgctgggatactaataacaaatactaatatacttgcaataactgatatagcttttcgtttagtattatcatttttagtgaaatttgagacatttaattccaataaagaaatagaagacgttaatgctgcaaataaaaatagaattaagaaaattaaataaaatacaataccaaagcccatttgattaaatactaacggtaacactttaaataagagtcctggtccttcttgaggtgcataaccaaatgtttttaaggctggaaatattgcaagtcctgctaatacagaaactaaaatattcataataacaattgacatggcggaagatttaatcgtcatttctttaggcgcataactcgcatacgtaatcatccctgtcgttcctaatgatagtgtaaagaacgattgacctaacgcaaataagacacctttaactgaaatatcttctattctcggttgtaatatatagcgaacgccctctaatgctccgtctaatgtcaatgatttagcaacaacaataattagaaaaacaaataataagggcatcatcattttagaagctttctctaaacctttttctacacctagcataacgatgaccatggttaaaagaataaaaatgccctgtcccaacacagttaaccacgggttactaattattttttcaaatttaatttgagttaatgacgtatgttcaacagataataattgtaaaaatacatttccaatatatataacaatccagccaccgataacactataaaagccgaataaaataaaaacagctaaatttccattccacccaataatatttaaccatttttttcctgttaatttactatagattcgagtcgtataagtgcgccccattattcctaccgtaaactccataatcagtaacggtaatcctacaaaaatagtaaagattaaaaataaaaataaaaatgcgccgccaccataaatgccagccatatatggaaacttccacattgcgcctaatcctatagcagaaccagcacttgctagaataaatccagttgaggttttccattgtgattgattactcattttctatctccctttaacgcgttaaagcatgtgtgcgattaagttctactctaacacgtctgaccaaatagtgcaatatacatataaatgagtattaaaaaagataagaatagaggtaaatgacatatctcaactattcttatcgtttaaacttactgctatatttatttttcaaaatcatatattatggattgaccttcatttacttcttgaatatttaaactttcgatatgatcaacgttaatgtaatgaacttgtgagtcatcttttaaaaataaatagaccaattcatcaaactcatcaataatacgctgtacgcatgtgtcatagtctggaccatcttggaacgttttaaattctttataagtagttccagaaactgttgtatatataagtaagaatgtacgtttcatcttattactcctttatttagatttaaaaaaagttacgacttgagtgataacgtcttcatgtccatctccataagtcattaaatgacgacttaacggatgacatgttaaatctttgttattactatcaatatgattaaaaatataatgtgcactattttgataaaaggcatcatcattaccgccatacaaaatacgagcgggaacttgtatacgttctaattcattagaaattacctcaataaatgctttaaattctgcgatatgtggttgataatcttgaattgtcccaagttgttgttttgaagtagtttcatcaaatttcaataattgattcatgcgctgaccataacgtttcatacgccacgcaatacttttttcttctttttcacttggtgcagacatcactgctattttagaaacatcaaataactcagctaactttaatgtaaatagtcctcctagtgagatacccgttacaaaaatagtgtcaaacccttcattttttaaaaattgatacccttctaatacatcattccaccaatcctgaatcgtaaattgagtaaattggtctaaaggtaagccatgtccttgataatttggtgcaaagcatgtgaagttttcttcattaagcgccttagctaatggttttacatcacgaacagttcctgtaaatgagtgaagtaataagatcgcttcttttcttgaaccttctaaataaattggatgtggtgatttgattttcatagtattctccccttcttaaaatacttatgttatgaaacttaagctttacttttttttaatttaatattaaagaatggtaacgtcattgaaaataaagcaatccaaatcattcctaacgaaaaaccaccaatgacatcagttagatagtgggcgtggaaatataaccgacaacttaatacacctatccaaaatataacgacaactatagcaatactatatcgtatcgctttatttttaataagtggaataacaactaagagtatagctaaagcaaataatgtactggcatttgaatgaccacttggaaatgaatatccatggtctactaaaagatggttatacggacgaggacgagctattatttgtttaattaagaaattaatataagttcctgtgtaaatcgtaactaataaccacaatgaaagtttataatttttaaaaattaagataagtgctaaaaataacgttatgtagagaatggattttacttctccaaaattagcacaaaacgtcatcattttatgccaaattggaccgtcatagtgtcttctaggtttaccaaaatagttggtcaacgcatgtaatgaatttaaatctaatttttgcacgagtgtggtatgataaatgacattcattgccgttattataaaaataattaatccaacaacaaacatagaaatagttttggttggcgatacttctaatttatctttcatacttgtttttcctttactacatttgatcctaatattttataaaaagctttcaaatgatgtatctgttcttcatatttattaaagtttgaagaggataaccacttattcaacctttctttattatcaataagttgtttcacatacgtcataaagctttctttatcataaaaaggttcgtcataaagatacgtccagttagcctctgaagatgtatcacacagttcattatatcaatcatcaatatgttgactacttaactcattgattgtattacccttttatacctctaggatcaggatagtcgggcaaatgataatgagtaagagattttccaattagctgattgaattgatcgcatctctatccctcttttaatgttagttagattttacaataaatgatgaaaatttgcttgtaaaaaaagagattaggaagtattttatataaagtttcctaatctcttctcgtatttataacattttattttaaagtgatttttcaaggttcttatctaacttaaaaacaataatacgttcaccagtaattgtacttaaatcactatgaaagcttttaacttcagtacctgtgactttgaaaacaagttgcattaaatcatcttgtcctgattccaccaattctgaccgtgtacgtttaatgttaagtaatccttcttgtgtttcacatacgcgatactccgcaggcgtcaaaataccttgtaagttgacgataatcatatctcgtaaaatatctgtctttactgacaacgaaccacgtccaagaaaatctttttcccattgcgtaattgctttactaatttctgcttcatacatgcctttcgatttcgtcattgttataacaaatctcctaatgtttaattaacactagtgtatcattttttaaattaaaatcgaatatcttaccaatctttaaaactaccgttttcatcaatacttgcaagacgtacccattgatgatcgactttttgtttaaacttaatattatcattaagtaaacgttgtatataacgatctggtgcttgaatcacgactaataatcgaattggagcgtgataaattttattgtctcctgccatcacggactgccatggcaatccagctaataaatcacttgagttcccttgcataacgccaacaccagaagtgacagattgtgttgttttattaccactaccataaaaatgcggtgccactgtagaggcataatactgtaggttaatccactgtgcaacgagtgctggaccagaaataattgtatttagtaattgaccatcaggatctttcgcataatcataattatgtaaaaatgcacgtccttctaaattactaccttctgtaatacttcgttgcccaataataaattctgcattacgtgctaaaccccattctggacggatttcgctccaatcatttgcaaagcgatgtgcttccgcaattggatgtttcaattccctatcgcttaaacgaggtaattgagcaagacgttctaaatttgcatgataacttacacgtggcatggcttcttctaaaatatcaaatgctttctttgcttctgatgttaatgagggaacgtaaatccattctaattcatcaattgatgttttatgttctgcagcaacaaatactgtctcatccggaataagaatgccttcagcggctaacccttgacgtactaaaggtaaattgcacatcatggcaagtaatttcgcattaaatccacttgaagctcctccacaagcaccacattctaatgatgcatggtagggattattgtttgtttcgcttccatgccctccaagtactactaatggtgcaaaatttgtagttaaatccattaattgtaacgcttgtttcgtaaaagcaatttgttcttcttcagtaaatccaacaggtaaatcactatgtacatgatgatctctatcaatcgttaacttagcattcggtttttttaaccaatttttagtaaatttacgaataaatgcacctgttttctttggcattaatgtacttgcaagtgtatttaaacttaaaaatggcccacttaattctggtaataataaactaggtagcacattattcttcattaatttaaacgtataaaacatggatgtaatagaatgttgctgttgattatacgtatttaatgcatgtcgctctgcatattctttaatagtatatgcaggaggcaccatcactggtaaagaatcatgactaaactgttcatctaatgctttttttcgtataggtaaaccaaagaaacctgcaattcctatcgtttcaaatggcccttgattttctaaatgacgacgaaatggttcagaacgtacatcgatacaaaatgcaagttgcacttttgtaggttgtttgtcacgcttgaccgatttatcgtaaatcatctcaacgagtttgcgttcgtgagtttcttcccaagcctctaaccataatttcttgaagtataatggattaaaatcatgggcaaacttcaagtgttcaatttgattctcaatggacatctcagcccattcatcaatagtcatttcaccataatataaccatttactcacaagttcttttattcttttttcaacatttaagactgccggacggctcattttttcagtatctaatagaatacattccattgtaaggcgtattgcaaggtattgagttaataaatctttttcatgttcatgtttttcagcacgataatacatcatgcctgcccaacctggtaacgataaaagatgtccagttaaataaaattcatattcatcttcagcaatatctagatgattgagtgccatgattaatgcgtcttcatagttgtgtggtaacatcttaatcattttacgttgcgttttagtcaacattggatcatatttcgctaaatgtaaccaggctacatagaacccttcttcgcgtttaggcattgtccaactggattggaaagtatctaaatataactttgaccatttaataatatgagtatttaactcatccattaaagattcgcctttagcattaaatgcatttgcactttttgaccgtgcataagcaaatgactcattttcgaatacttttttgagttttgagacttctaatttcagataggcttctttagtaattaaatctctcggaatatctttaatattcatagcatttttgcagtacgtatcaacgtgagtcttaggaatatccgtcttataagattgaatagcttgttgtacttcttcttcaacgatatgtttatcaatctcaccattttcaagcgccgtcattacagaagcatggcttggatataaatcaatatcacgcacatgtttaaaccattgcgcaacttgatcaaaggtttgatactcaagttcttcccatggattacgtgctgcaaagattgaaattggtgaaagtggcgtaatcacacgacgtgcagattgaacaacgtcttctatattaattgtcatgtaaatgttcacctcttataaatatttctttaaatagtttggatggctttctacagatttaaatttagcttctccaattttaattaaccataagtaaactttagcaaaggctgtagatgtacgatggcgagcgacccaaatactaaaaatactacctaacactaaaatcgcaatactaatgataatactaattaacggtggatgggcaggagccatatatacatgatgaagtatattaacaaatacttgatgagtcacaatataaaccattgcaacaactacaatcattgtaatacctataaagcgtccctttactcctttatttaatgccacaagctgattccatgatacagagatagaccatgctaagataaatgcactaatcaaaatatatggactatggtcacttgtcataaaaaacacaattgcaataatcaatgcaagagcccttccaagtattatccatccatatgatttcttaatattaggtggagttggtatattaaatcgtctgacaactgagcctgattgtaagaataacgtggctttaaatataccatgcaatattaaatggataatcgcagctgaataaacacccatcgcacattgaacgagcataaaacccatttgactcatcgttgatccaacaagttgtcgtttataatcaacatgtactaaactaatgcccgaaccaatcaatactgacatactagaaataattaataatattgtaagagcaatagaattatcaaatatcggtgaaaaacgcgttaaaataatgccccccgcattaactataccggcatgcataatagctgatacaggtgtaggcgcaacaactgattcaattaaccaactctgaaatggatattgcgcagctggaataataacagcaacaacaagcaataaatcaataactaattttagactatgatttagagcatagtcataattttgagaaggatcgattgtccattctcctgttcctatgtatagcaaaataaccgcaattaatagcgctaaccatccaataataaaggaacgtgcagaaacttttgctgcctctgctggcactttccaagttttattcaatctaattagttgtgttaaacaacataacgttaacccccaacataaagtcattaaacgtaagtcattgcttaaccaacctagtgaagcaaaaacagttgtaaatgtatataaaggaaaatacttacgataattgtgatctcctaataaataacgcgttgaaaacttttgaataataaaacctaacgctaaaacaaacgcacctactaaccaagcaaatttatctaatgcaaatatgccaataacttctctttcgtttatagttactaaccctacaatacctacaataactggtaatagaagtaaagctaagtgaaatcttatgtatttaactggaactgagggaattaatacaatcaatccacttaatgctgctataataagcgttataaaaaataatataagtaaactactcatacttaacattatcattcctccacttttaaactgtaacctatatataactattacttataatataataaaacacctacaatagtttagttttatcccattaaaaaaggacgactatctattgtaggcttcttttatgctcattcaatatatttattaatgctctttaagcaacctataatttagatttaagtacatcagttttacccttcaattaaacaataaagtgcatgatactttttgtctcattgcttgatataaacctatgtataatttgatgcatattaaatacaatatatgaaaatatcaactaaaagtcaaatttctaatataaaagataacagtcatatcatttcaactttcctttttatatcaattttgtttaaataataccccaaaaaatattataaactcaatctttaattactaatatataaaaagagtttgagacgataaagtatgtcccaaaccctcatggataaaatgaatttacttcattacttataaaataacatactttgttcaatattcatgtaacaattctgtgaaaacgcttaatttttttgtaaagtttttttatattttatttgctttttttgaataatgaaggatgactatcatatttttgtgattgccttagctattttgactttaaatttattttaatattaaatcagtctttgtaccgataactttaatgctttaacaagttaaactatattaaaataaagaaaggtataatacttatgcaaaataaacaatttacattaaccatttcattcataataagtagtctcatttttttaataactattttttcggtttttactaagtcgttatgggcacatatattagatttacaatcattctattggttcttaaatacatttggcgaaccaaaaatgaatttcaaaggtaattggttcaatgattttatgacgtttctagcatcatacggtgatattgcgacctttattacccttacccttatcatcgcaactatcgtattaattaagcgacgcttcttattagcaatatggttaccgacaacagtagcttcagcaggtatcataggtattgcgttaaaagacatcattcatcgttcaagaccttatgatcacttaacaattgatgcaggattttcattcccaagcggacatgctttaacaagtacgattgttatttttgctcttatttttgtacttatctctaaattaggaaatatgtggataaaatgcataataaatacggtgttaattgtagtatggttaggtattttattttcaagattatacttccatgctcactatctcactgacgtagttggcggtatcttttttagtctttcatggttattcatgtcattgatgatgtatcaatatatgcttcaaaaagtaaaccgtagagcgtcactacaacagagacgacaatcatttcaatcaaaaagaaattagcatagacgtccaaattattgaatttaatataaaaaaagcgagcatttctcacgaaaatgctcgtttttttaatgggctactcccattctatagtacttggtggcttagaagtaatgtcatagacgacgcggtttacatggtctacttcattaactatgcgactagaaattttttgtaacacttcccaatcgatacgtgcaaaatcacttgtcataccatcaattgatgttacagcacgaatacctactgtatgatcatacgtacgataatcacccataacacctacagattgaatacctggtaatactgtgaagtattgccaaatctctctttcaagaccttcttctcgaatcacttcacgtaaaatcgcatcagattcacgaacgatttctaatttatcttcagtaatttcacctaacacacgaatacctaaaccaggacctgggaatggttgtctccatactaaatgttcagggatacctaattcaatacctaaggcacgaacttcatctttaaataatgtattaataggttcaatcaattcaaattccatgtcttcaggtaacccacctacattatgatgagatttaattgtttgcgctgtctttgtacctgattcaatcacatctgtgtaaagtgtaccttgtgctaagaaatcaacatctgttaatttagccgcttcatcatcaaacacatatacaaattcattaccaataattttacgttttttttctggatcagagacgccttttagtttttccataaaacgttctttggcatttacacgaataatattcatatcaaaaccttcaccgaattgttccattaccatatcgccttcgcctttacgaagtaaaccatggtctacaaaaatacatgttaattgatcaccaatggccttatgcaataatactgcaacaactgatgaatctacaccaccgctcattgcacataatactttacgatgacctacacgttcacgaattttttcgatttcaatttcaatgaagttttccattgtccattcacctgtacaattacatacacgacggacaaaatttcttagtaaatcattaccgtattctgtgtgacgtacttctggatggaattgtacaccataaatacgacgttttttatcttcgatggcagcataatttgtacttgggctatcagcaatcacttcaaaaccttcaggaatttcaatgactttatctgaatgactcatccacactgtttgttcttctggtaaaccaaagaataactcatcagattttgctttaataattgctttaccatattcacgttcatttgcacgttcaactttaccgcctaatagtttggttgtaagttgcataccgtaacaaatacctaacactggaatacctaaattataaatctcaggatcaattgtaaatgaatcttcttcataaacagagtttggacctcctgaaagaataatacctttaggattcatacgtttaatttcatctatagaaatttcatgatcgtgtaattcactgtaaacgcccatttcacgaatacgacgtgtaattaactggttatattgactaccgaaatctaggacaagaattaattcttgttctttagccatttccataatagtaaatctcctttaaatttaatttatgtaaacaatagaaagacgcttttcatatttataaagacaatacatcgtttcaacctctataaatattttatagaaaagcgtactttcttaatttaatcgtttcttgctcaccttacattaaaatgaatagtttggtgattctttagtaatttgtatgttatgtggatgactttcagctaaacctgcagggcccatacgtgtgaattgtgcttcttcacgtaatgcttttaagtttggtgaaccagtataacccataccagctcttactccacccataagttgataaatggtatcttgtaatggtcctttataagctgtgcgaccttcaataccttctggaacaaattttctaggagacttatcttcttggaagtaacgatcatttgaccctttttccattgctccaagagaccccattccacgatatactttatattgtctaccttggaagacttcagtagcgcctgggctttcttcagtaccagctaataagctacctaacataacagcatgaccaccagccgctaatgctttaataatatcaccagagaatttaataccaccgtcagcaataatcgctttaccatgtttacgtgcttcagtagcacagtcatatactgcagtgatttgtggtacacctacacctgcaacgacacgtgttgtacagattgatccaggtccaatacctactttaaccacgtctgcacctgcttcaaataaagcgcgtgtggcttcagcagttgcaacatttcctgcaataactgtaagttcaggatatttatctttcatttttttgacttgctcaatcacacctttagaatgtccatgcgctgtatcaataattaacgcatctactcctgcttctacaagtttttgtgcacgaatttcggtgtctttagatgtaccgatagctgctgctgcaagtaaacgaccatgctcatctttcgctgcgtgagggaattcaagtactttttcaatatctttaattgtgatgagaccttctaaacgacccttttctactaatggtaatttttcaattttatgcttttgaaggattgcttctgcttcatctaatgttgtaccaactggagctgtaattaaattttctttagtcatcacatctgaaattttaattgagaaatcctcaataaaacgtaagtcacggtttgtaataataccaacgagtgttcttgattcttcatcttttacaataggcacacctgaaatacgatatttacccattaatgcttctgcttcataaacactttcatctggtgttaagaagaatggattcgtgataacaccattttctgaacgttttactttttgtacttcatcagcttgctcttcaatgcccatgtttttatggatgacacctaaaccaccttgacgtgccatagcaatagccattttagattcagttactgtatccataccagcagagataactggaatatttaatttaattttatctgataattctacgcttaaatcaacatcacttggtaatacgtctgatgcagctggaattaacaaaacatcgtcgaaagttaatgattctttagcaaacttattttcccacatttataacacagcctccattttttatatagttagtcttattatttcacattttcctcgttttgtttatactttataccgttaaaaaagaaattaagaataatagcagagattgctcctaaaacaataccattttgagttaaccaagcgaactgttctcctaaagctttaaatgcttgaggtacagcactaattcctgtaccaagtccgactgatacagcaataattaataaattattttgatttttgaagtcaatatttcctaaaatacttaccccataagccattaccataccaaacatagcaatcattgcaccgcctaatacaggtaaaggaataatattagccagagcacctaatttaggtataaaaccacatattaaaagtaagactaccattccatatatgattttatttttcttagctccagaaagtgaaacaagtcctacgttttgcgaataagctgtataagggaaagcattaaagattgatcctaaaatgatggctagaccttccgcagtgtaacctttacgaaaatctttacgttcaagcttacgaccagtgatttcacttaatgcatgatatacacctgtggattcgatcagacttacaattgctacaattgtaaacactaatgttgcaccgaaatcaaagccaaatcctgagaaacggaatggtcgtggaataccgagccaatgtgcgtcaccaacttggctaacattaactaatccaaatatactagccaatatcgtgcctataactaaaccaatcaaaattgcaatagattttaagaatcccgttgtaaatcgttgtaatagtaagataacaataagtgtcactccacctaaaattagatttttagggttaccataatctttagcaccttgaccaccagcaagataattcatagcaacgggcattaagttaattccgataattgtaacgacactacctgtaacaacaggtgggaaaaatttaactaaataagaaaagaatggagcaatgattacaactaagatacctgataggaacaatgatccatataacacgtctaaacctttagtctgtccaattaaaatcataggtgctacagcagtaaatgtacatcctaaaacaataggtagtcctgtaccagtaatcttatttgcttgtaaaaatgtagctactccacacataaaaatatctactgtaattaaataagcaatctcttcaggtgaaaattttaaacttgttcctacaatgataggtactaaaatagcacctgcatacattgctaataaatgttgtacacttaaaattaaatttttcattcatcttcacctagtaaagtcactttattccctgctaaggaagcaactttacataatgaagaaacagttaaaccagcctcttccaatctttgtcgtccatcttggaaacttttttctacaacaattcctatgcctactgtttctgctttagcttgttgtgcaatgtcgtacaatccaagtgaagcatcaccatttgctaagaaatcatcaataattaatactttatcttcaggccctaaaaattcttctgatacaatcactgtacttgttttatttttagtaaatgaatggatatcagtactgtaaaacccatcttttaaagtacttggctttgctttttttgcaaataagcatggcacatcgaaatgtaatgcagccatgattgcaggagcaataccggaagcctcaatagttaaaattttcgtaatccctttacccttaaattgtttataaaatgtttgacccacttcatacattaatttggcatcaatttgatgatttaaaaatccatcaacttttaatattttttcatcaatgactacgccatcttccttgactttttgttcgagcgcttccacttcaaaacctcctaaactttatataaaaaaacccgaaacttttatctagtttcaggatctataagtgaacaagtacgatacacattcatttgtaacttagaagtaaataatttagatttatagatgataaacgatactttacattatacaaatgataatataatacaagacatcttagccaatcctcaaacttctcattaacttccttacctttgtacttgaactcatagtcgcgttgtttatggcaacacggtagaaacttctaaagccatattcttcagattatatgagcaatataaattatttaatgataatagcaaattttaagcttattttcaataactgagggagagtttatccttgtaatcacgctacttataaatgtaagcgtttaatgtcttattaaaaaaaccgtatttgtaaattacatatttttaattatataattataacgaaacgttttatatctattcattagggtataattatttaaaagtagcatgaaatgatggaggacgatgaatatgccagatattacagttctagataatgaaaatcaaatttacaatgtgattgaaaagaaaaaagcagaaggatattcagaaaatgagatatttgttatcagtgaatctaaattacatttagatgatttacataattctcaagtaacacttatagcaacaagtggttcattcagtgatcgcatgtcacgcttattaaccggtgaagatggtgaagaagctgtattgaataatttcaaactatctgataaccaagcagaacaatataaaaaagatgtgcttgatggcaaatttttagtaatcactagaaaagacacttcttcacataatgaagttgaaaaaaacaacgcagcttatgaagaagttgatatcactcattacgctaatgagtctgatggtccaaaatcttaaaaataagtttaaccattcattgtatttaatcatgtcgattgttaaatgaacatacgtttttacaaagtaacagtcaaaaattaatatatgcttctttcaaagtaaagtgtgaatcgtttataactttgaaagaagttttttattatattttgtattatgatgtgctactttacacatgtgctatacttaaaaaaatataatgcgggagatcgctatgaaatttcacactatttattctttagaagacgcttattatcaaaaagctgtcgagttttataataaacaattagatgttgatttttttgaagacagcactatcacaaaacgatccttacagaataataaaacagaaaatgattatgttttgattgttggtattgagaaagaaaatataatcagtttggccacagcacactacgaagcaacaacaaattcagcaattctagtccacttattagctgtagttgattcaaattataatgaaatcatatctcaaactttaaatgaagttgaaacacacctaaatatattatctaataaagtacattctagagatattaactttttaatgattgaagtcccgaaacatgataatagcatattagataatcaattaattaaacgacgtcatcatatcttattagaaaatgactttgaacaacaatatgacattgactacttgcatcctaattatacgtttgaagaaacacctatacatactgacttatttattaaatctaacattgaacttacaaaagacatctatcctgctagtgtgaaatctaattatattctcaaatatgtttttgcgaatggaatttctagagatattatatatccccttttagaaaagatgaatttacgttcatccttatagaatacttgaaaagagcgatataaaaggttaaactaatatgcgaggttagactgacgtttcacttaccgaagacaaacgtcagcgtaaatgaatgaatatattatttaaatatgaaaggacttcattatgttaactaaagaatttgctcaacgtgtcgagctaagtgaaaaacaagtccgtaaaatcgtccaacatttagaagaacgaggatatcatcttagcaagactgaatatcgtggtcgtgaggctacagattttaaagaagaagatattgaacttttccaagatattgcagaaaaggtaaaacaaacaaatagctatgatttagctttcgaagaattagaaaaagaaaaagactttttacaagttatcgttaaagaagaccaacaacagttacctactgatcaaggcgttacacaattagtagaagacttacgtaccgaaatacaaaaaatgcgtgaagaacgtcaaatgttaggtcaaatgattactcaagttcatcaacaacaaaatgaacttaaggaattacaaagtcaaattactgaaaaattggaggcaaataatgagtcattagttgccattcaaacatcacaacaggccattcaaacagctcaaaaagaacaatctgattatactaaaaataatttggttaaagaaattaatgataacaatcaacaagcgattgatactttaaaagagcatcaaacttatgtttcatcttcaaatgagaaaaaaggattcttagctagactatttaatctttaatgtcacaactgtatatagtgctatttactaaaacaggattgaaattaaaaaatttcaatcctgctttttttgttttaatactcattttgtatctatttatcattagtttgtaaaaacatttaataatttatgttatttaaagtattgaattattatatatttaatactattcttattaaatgtgtcggatttaactaataaaaggagaatcattatatgggaacattattttcaattattaacattgtcatcatgttgattttcattatcggcttattcattatggctaaaaaacatgtatcattcccaaaacgagtctttaccgctctaggattaggaattgtatatggaattattttacaccttatttatggtgttaattctaaagtccttgaaaccacaactgattggtttagcatcgttggagatggctatgtgacattattacaaatgattgttatgccacttatttttatttctattgtttcagcatttagtaagatacaaattggcgataaatttgctaagataggttcttatatttttatgtttttaattggtactgtcgctattgcagccgttgtaggtattttttatgctattgtatttagtcttgatgcttcaagtatcgatttaggtagtgcagaacatgcacgaggaaatgaaattagtagtgaagcgaagcagcttacagcgaatacactaccacaacaaattcttgaattattaccaagcaatcctttcttagattttactggtcagagaacaacttcaactattgcagtagtaatatttgctatttttgtaggatttgcatacttacgtgttgcacgtaaacaacctgataatggtagcttattaaaacgtggtattgatgctgtttatgctctcatcatgtcaattgttacctttgttttaagattaactccttatggaattatcgcaattatggcttctacaattgcaacaagtgatttttcagcaatttggacattaggtaaattcatgattgcatcttatgcagctttacttacaatgtatgttattcatttaattattttagcgattatgggaatcaatcctattcgttatgttaaaaaaacacttgaagtactgatttttgcatttacatcacgttcaagtgcaggagcgcttcctttaaatgtgcaaactcaaacgcaacgtttaggagtacctgaaggtattgcaaacttctcagcttcattcggtttgtctattggtcaaaatggatgtgctggtatttatccagcaatgcttgctattatggttgctcctgttgctcatgttgacatcgatataccattcattcttacactaattggcgttgtagtgattagttcatttggtgtagctggcgttggtggcggtgcaactttcgcttcaattcttgtattatcaactttaaacttaccagttgcattagctggtgtattaatttctatcgaaccaattattgatatgggtcgtaccgctctaaatgtcaatgattccatgttagcaggtactggtacagcacgtttaacaggtaacttagataaagaaaaatttaattctaaccattatggagaattatccacagaatcataaaataacaaaagagacagaatttcaaacaaattctgcctctcttttttcggttttattttatcttttcattagtccagctttatttaattgctctaacatatctaatcgtgctttcccacttaaaaatccagcaacttgttgagaccaggtttcatttcttacaccatttgtacggtcttgatagtatttactaaccctttgatcataagtgtttaatgtttctttttggtgtgctttattgctattatagacatttttatggaagataagttcaaaaggtaaacgtggttttggtgatccattttcatccttagctggctctcctacagccataccaaataaagggaaggcatattcaggtaagtctaaaatctcacgtacacgcccgacatcattgcgaagcgaacctaagtatacaatgccatagcccatatcttcagctgctaaagcaatattttctgatactaatgcaacatcgatggcaccaactaataagccctcagccgactcaaatgacgtctccatatgttgttctacatcttcattaataagattgtgacgataataatctaaaacaaatacaaataaatagccattgtctaccacatattgttgccctgatacttctttgagttgtgctttaatttctggatcttctactccaataatagaatacgtttgtaaataactagatgttgaagcactttgtccagcttcaactaactttctaacaacaccttcacttaaaggttgatctttaaattttcgaactgaatgatgttttttagctaattcgtaaacataatctgacattaagtccactccttttttaattactgaatatatattaacaatttatattttatttttcttcaaaattgccctttattttaaattaagatttgcatgctaaaccaattaaagttatcataataatgacaattttcagatatcaaaggagagatactatgactcacgctaacaaagaagtttcaacagccttatatcaagcttttacatcaaaaaaaccgattaattttatcagttcctcttttgaactaaatgagttagaagcctatcacacacaagatgatctcattaatcaattaaaaaataagcaaaaatcagaaattaaaggttacaaagtaagtatgacaagtgccgccactcaagccattgccaatacaaatgagcctgcgtacggtactattttatctactcaagtcgtcgagggggataactctatctcattatcaacattatttgatccgttacttgaacctgaacttatttttgaattaactgcagacttaccagagcatgccgatgttcaaaccatcttagaaagtgtaaaagtagctccaggtattgaaattcctgacgcacgttataaagattggttccctaactttgctttatcagatttaatttcagataatactgccacaggtttaattgtggttggaaaaagagtaacacctcttgattacaaatcatttgctgatattaacttaaagttatttaaaaatgatcaagaaattgaaacaggacactctagtgacgtactcggaaatcctattgaatctataaaatggttaaataaaaaattacattcacatggaaaacgtttagaaaaaggtcaatttatttcttcaggtacatttatttcaccactacatttagaaaaaggtatttatgttgctgaatacgagaaagtaggaagcgtaaaagtagaagtcaacgactgattttaataaaataatattgaaaatacttgatactctcttcagatttatatgtttcatagcgtaacttgaagagagttttaatttattatgtttgatttccattatcaaatactttgatttagttgagaatagatttaagcgaaaagatgtatttatatttacaatttacattttttaatttaaaaaaataaacctcacaatatcttaaaaaagttaatatattttatatgaaccttgttatatcagtgctttatattgtttttcttacttttaagtgtattatgttgacgaaataaaatctacatgtaataatattaatcaagagattagaattattacaaataagcaatgattattatgtagttctaattaatattcgataaatcaggaggaatttaagttatgtctttaattaataaagaaatcttacctttcacagcacaagcatatgatcctaaaaatgatgaattcaaagaagtaagccaagatgatttaaaaggttcttggagtgttgtttgcttctatccagctgacttctctttcgtatgtccaactgaattagaagatttacaaaaccaatatagccaattacaagatttaggtgttaatgtattttcagtttcaactgatactcatttcgtacacaaagcttggcacgatcattcagacgcaatcagcaaaatccaatacactatgattggtgacccttctcaaatcatcactcgtaacttcgatgtattagatgaagaagcaggtttggcacaacgtggtacatttatcgttgaccctgatggtgtagttcaagcagcagaaattaatgcagatggtattggccgtgatgcaagtacattagtaaataaaattaaagccgcacaatacgtacgtcaacatccaggtgaagtttgcccagcaaaatgggaagaaggttctgaatcattacaaccaggattagacttagtaggtaaaatttaaggaggcatttaagtatgatgaatgctgatttaaaacaacaattacaacaattattacaacttatggaaggcgatgtagaatttagagcaagtattggctctgatgataaatctaaagaattaaaagatttattagatgaaatcgctgagatgacagatcatattacaatcgttgaaaaagaattaaaacgcacaccaagtttccaagtaagtaaacctgaagaagatactggtatcacatttgctggtattcctttaggtcatgagttcaattcacttgtgcttgctattttacaagtaagtggccgtgcgcctaaagaaaaacaagcaatcattgatcaaattaaaggtcttgaagataactacaattttgagacttatgtaagtttaacttgtcaaaaatgtccagatgtagttcaagcattaaacttaatgagtgtaattaacccaaatatcactcatacaatgattgatggtgctgtattccgtgaagagtctaaggatatcatggcagttcctgctgtatttttagatggtgaagaattcggtaatggtcgtatgacaatttctgatattttatctaaacttggcagtacccaagatgcttcagaatacgaagataaagatccatacgatgtattaatcatcggtggtggaccagcaagtggtagtgctgcaatttatactgcgcgtaaaggtttacgcactggtattgttgcagatagaattggtggtcaagttaacgatacagctggtattgaaaactttattactgttaaacaaaccactggatcagaattctcttctaatttagctgcacatatcgaagaatatgatattgatgctatgactggtattcgtgcaactaaaattgaaaaaactgataaagctatccgagtaactttagaaaatgatgcagttcttgaaagtaaaactgctattatttcaacgggtgcaagctggcgtaaattaaatattcctggtgaagatcgcttaatcaataaaggtgttgctttctgtcctcactgtgacggacctttatttgaaaataaaaacgttgcagttatcggcggtggtaactctggtgttgaagcagctatcgatttagcaggaatagttaaacatgtgacactatttgaattcgctccagaactaaaagcggatacagtgttacaagaacgtttacgttctttccctaatgttgatattcacacaaatgctagaactgctgaagttctaggtgaagatcatgttactggtttaagctatgaagatatgtcatctggtgaaatgaaagaattaagcttagatggtatctttgtacaaattggccttgtgccaaatacaaaatggattggtgacgcagtagagttaaataaccgtggagaagtcgttgtggatcgtgaaaataacacaaacgttcctggtatttttgctgctggtgacgttactgaccaaaaatataaacaaattattatatcaatgggttcaggtgctaacgcagcattgagtgcatttgattatattattagaaattaatttaaagtttaactttctatatgaaagtaagacttagaacttaacctatcaaatatcttcattttaagcagagtcattttattaacgactctgcttttttaatttacttttttaatgctattgccacaatttgttcatagatttatattaattttatgtcttaaacattcaattctgtttctataagtgatactctattattattcttaaatagaaatgtttactaataaaggagattattgaagtctatgaaaaagagtatgattattagtagttttttagccctgttattaatgttaagtgcgtgtgcacctaataatgataataatgaagacaatcataatcaaagtaacggtgttaatgcaccgaaacatgctaaaaacttaactgaaaatgatatttttacatcgaataaatctcatcaaaagcttactgaagatgaaatgaacaaagcaatcaaaaaatatctagatgttaatagtgatattttagacaataaatatataatgcaaagtaaaatcgatcgtcaaagttcaggacaaacaaaaatcactgataaacaagctaaaaaacttagtcatttatctaatattgctgttaaaaatgacttacactttaaaaaatatgttgaaaataacacattgccagacggctataaagataatgtaaatcgtattattaagtactttcatgctttgaatagtacaattgcaaatgttgatgaaagtatcgaacaactgaattatcaacctcaaaatacaattaacattgtagatgttcctactcattatgctggagatgtaaatggcaaccaacaaaataaaatcaaatctttcttaaataagaaagatatcaaaacaaacgtttttgataaatagaatagggagtatccatttgaatatgttttcccagtccattaatggtgatgtcccatatataaaaaatctgagacgataaatgatgtctcagatttttttataattcaatgagatatggcttacaattttcaattactttaattaatgcttcttctttatttatatagccaaagtaaaccataatacaacgaatcacaacttgatgtgcaataatgactatcgtgtaatcatcttgaatatgaatcgtttcgaaaaactgtttcactctataataaacatcattataactttccccctcaggtgctttttgaataaagctatgtcgaaaatctttataatttggatcatgaaaataacgatgatacatattgtttttcataagtttatccttaaattgaccttcaaatagacccaatgaacgttcacgtaatagtgatgtgactgtagttgggatatcgtaagggaagatatattgatatgtttctttcgttcttgttaaatcagatacatacacatcattaatttttatattataaaaatatgactttaattgttttgcgctttcaacgcccttttcagttaaaggaacgtctaactgaccacaataatatgctcgattgtacttattatcataattagactgtgattcaccatgtcgaataagatataaattcatgttttacctcctatttcaatttattatattaaataataaatgaatgaagtctactaatcatataaatgatatatttttaaataatatacatttttatgattgttattatttatattgcatgatactattaatatgtagttatttaataactacaagtcttttatattcatgaacataatactcctggatgacgccttaacccgacgtcatcctctttttttagtttaataaataaaaaaagagcactacataacgtagtcccctttaaaatactatacctattttttgattgcttttaaaattaaagaaacaataaaaataagaataattgcaccgattaatgctgggaagattggtactccgccccaaacaggcccccaagtacctaacaatttacttccgatgaatgaaccgattaaaccagcaataatattacctaagataccaccagggatatctttacccatgatcatgccagcaatccaaccgattaatccaccaactattatcataataataaagcccatagttagattactccttatagttttattttgtttacttcttaatcataccacctatttaaattttataaacatcattattaaaataatttattttttataacaaaaacaactaaataataactcccacatattttattagtatttattcaattaatgattaaaaatataagactactaaaaaatagcaactatttttatataaaatacttgctaaacattatgaacaactttaaaggaacaaaacatattcatgttgaatataatgtcttgttcctttgtttttattcttcggtatttgtactttgatgatttggttgtgcttgttcattacgatctatttgagaagttgtgggttcttctttagtttgtgtagaagcgtctgttgaagttgaatcattgttctcggattgattcgatgtctggacatcattttgagtttcagattgcgcactattttgattttcttcattagacgatgtatgttgtgtttcattatcattctttgtttcattattttgtacatcattgtttcgttgtcggttactttgttctaatttactttcattcatttgttttcttttagctttttcttcatctgtcatattattataattatcaacaatactacctgtatgtttatctacaatggctacataaggtgttccagtaccatatgcgtcacttgctgcataatctatataatacatctcgtcagtacttttactaggattgtaattaaattcatttcttaaacgatttccaaatccttgatttttataccaatcatagacaacatcctctgcttgcttcggtgtaagttctttattcaaagaatcatttgattgattgtcactagttgaatgactttcattcgtagtcgtttcattatttccattgattccattttcagattggttttgagtattctgttcggatgactgaatactcttattatcattgggttgaatatcttcagtttgattataattagtattttcatcattattattttgctgtgtgtctgatgaatctatatttttatcattattagtatcattatttttatttgaattattaggcgttttatttttatgatcattcttctcagttttttgcttatcctctgaactatcattatttccgcctggtaaatgaatatttaaatcacaagcgcctaaaaataaagtagatgcaacaatacctgctaataaatattttcctctcattatcatcataactccttatgtatgtctcttttaatgataacattttatattgcatacattaaagatattacgcaatacattttaaaatcaacttaaggtgtataatctatccattttttattactacgacataaaaataaccccgtaagccttgagcttacggggtttacactaattatatattagttttcatctttaacatatggtaataaagccatatgacgagcacgtttaatagctgtagtcaacatacgttgatatttagctgaagtaccagttacacgacgtggtaaaattttaccgcgttctgagataaaacgttttaataattcagtgtctttatagtcaatatgtgtaataccatttgctgtgaaatagcatacttttttacgacgacgtccgcctcttcttggtccacctgccatggttaattacctccttttatatttttaatctcattctttcgttagaatggtaagtcatcatcactaatatcaattggaccatttgcatttgcaaatgggttatctgattgattattgtttgatgcacgattattattattattataagatgtattttgtcctgattgtgaaccaccaaatccttggccataatcttggaaatcattatttccttgatgacgttgtccaccttgtggatttttaggttcaaggaattgaacactatccgctacaacttcagtgacaaatatacgacgaccttcttgattttcataactgcgtgattgtatgcgaccatcaacgccagctaaactaccttttgaaagatagttatttacgttttctgcttgtcttctaaatacaacaacgttaataaagtcagcttcgcgttccccttgagcattcgtgaaagtacggttaactgctagagtaaatgtcgctacacttacgcctgagggagtacttctgtattctggatccttagttaaacgacctactaatacaactcgatttatcatttcaacgcccccatttaattattacttatcttggtcttcacggataacgatataacggataatatcgtcattgattttagctaaacgttggaattcgtctgtagctctgttattatctgttttaatgcgtacgatgaagtagaagccttctttgaaatcttcaatttcgtaagcaagacggcgtttaccccaatctttctcttctaaaacttctgatccttctgaagctaagataccgttaaagcgttcaacaactgcttttttagcatcttcttcaatgttaggacgtacgacatacataatttcatatgttctcattttataattgcacctccttgtggtctatgcggcctatcgaatcctatccataggcaaggaataattttcattactcacaatcaagaattatagcataggtaattactttttacaataaatattatttgaaatattttgtctgaaagtggataagatctatcgtattggcctataaatttatattcaaactttaaacatatcttttcaaaaaagaactgatatcctataatatccttgaggtgtcactatgcaattagatttagattggaataaagattttcaagagtttcaagaaatcttaaattgcggtatcaatccagagtggctatactgtgcaaaagctaatatgattcttgagccagcatatactggagaaggtaaacagttttttagcaccaaagatattattaaagcaagtaaagttataccgtttttttaagatataactataatgatataactaaagcgcgacatctataataaacagatgtcgcgctttttatattcctatacattaaatcggaagtgaacaatatctccatctttcataatataatctttaccttctaaacgttgtttacctgcttctttcgcaccttgctcgccaccatgctcaacatagtcgtcataacttgttacttcggcacgaataaaaccacgttcgaagtctgtatgaatgatacctgcacattgtggtgccgtcatcccttgtctaaatgtccaagcacgtacttcttgaacacctgctgtaaagtaagtagataatcctaacaaatcatatgttgttctgataagacgatcgaggcctggttcttcaatacctaagtcttctaaaaacatttccttgtcttcatcatcaagtgttgcaatttcttcctcaatttttgcactaatgacgataacttcagaatcttctttagctgcgtactcacgaatggttttcactttatcattttcatcgtcaccaatttcatcttcgccaacgtttgcaatatataacatttttttagatgttaataattgagcttgatttacatatttttgatcttcatcattaaaatctaaactacgaactggatttccttcctctaatgcttcttttattctagataaaatgcggaactccatttctgctgttttatctttttgacgtgccattttttcaattcgaggcaaacgtttctctactgattctaaatcagctaaaacaagttccatattaatgacttcaatatcatctaatggatttacacgaccagcgacgtgtgtcacattttcatcatcgaaagcacgtactacctgacaaatagcgtctacttcacgaatatgtgataagaatttatttcctaaaccttcaccttttgaagcacctttaacaatacctgcaatatctgtgaattcgaaagtggtaggaattgttttcttaggttctaccatttctgttaatttatttaaacgtgtatctggtacttctacaatcccgacattcggatcgatcgtagcgaaaggatagttcgcagcgagcgcacctgcttttgtaattgcattaaatagagtagatttaccaacattaggcaaacctacgatacctgctgttaaagccatgaatcattctcctaactttctgtatcttgatgagatactaatattttttttatttttttatcaaacacttgtcgtggaatcataatacttctttgacaattttcacatttaattcgtatatccgcacccatgcgaataattttaaatcgatttgttccacaagcatgttgttttttcatttctactatatcatttataccatattttggtgtcacaacattacccccaacatttattaagcgtcttgtttatcagtatttcttacgtacatgggttgtggcaatttaataccttcttgtacaaacattttttgaatttctttgcgtaaaattctagaacctgaagcaccttctccaggaatagtttctgctgatattcttatgatcacttttgtttcatctaacccatcaattcctaaaacgactggatcagtaatgaataagtagtatttactacgcattgctgtaaataatttatttaatttcttttcaactttatctaaattttcatcaactgagactggaatttctacaattgacgtaccattagtaatagaatagttagtaatctcacccatactaccatttggtaaaatagttaactccccagtgatggtattaatacgcgttgatctcaatcctatagattttacagttccttcagcaactgtagtaccaccgctattaattttaacataatcacctacatcaaactgattttcaaaaataatgaaaaatccagtaataatatctttgactatagtctgggctccaaaaccaacagcgatacctacaacaccggcgctggcgataatcccatttacgctaattccgaacttacttaatactgttgtgagtacgataaaccacacaatgtatcttacaacatttttgataagggacacgagcgttttagagcgttttttattccctctattacttttattttgaaacttaaatgcttcttctatcgctttattaataattccaattacgattaaacctactaaaatataaataataatcattgctaatttagttgctaaatttgtatatacttcgggttctgttaatggttgaaatagcgatgttaacacgtgcttcaactgattcatataaccccctccttttctatttagtccaccttaaatttatatttcaatttatttattatacaaaaattcttctaaaattgtatccgtcttttgatttatcattttctttttttattttattaataggatactattcattaagcttatctataatacgtttaaactcagcctcggatttaaactcaaacacaattttcccaacatttttagatacagatatatctatatgagttccaaatttttctttaagcgcacgttcttgtttctgtatgaatttgggtttacttggagtatttactttttcttttttagactgcctaccgtcttggatttcagaaacaactttttctaaataacgtacactccacccctctttgattgcttgtttacctatacgtttcatcgtatttacatcttttaatgcaagtaaagtacgtccatgggcacctgacatgcgattctctcttacaagcttagcaatatcagagggtaaatttagtaatcttagcatattagcaatgtaaggtcgtgattttcctaacctttcagcaactttttgttgtgtcagaccaagatcattcattaatcgttgataactttcagcttcttcaattgcatttaaatcttctctttgtaaattttctataatggctaattccatcatgtcagaatcagaaagggattttacaattgcaggaacttcctctaacccagctaatttagaagctcgaaaacgtcgttctcctacaacaatataatatccattgatcgtttttcttaaaacaataggttgaagtataccatgagttgttatagactctgctaaatcttgaagtttctcctcatcaaatgtttttctaggttgatagggattagctttaatacttgaaattttaatatgttgtacgtgttcatcattatttaattgaacacgttgatcttcaatgttgttcatgcatagtcctcccttgtctttaaagtcattacttaattttaaaaaaagcgtgttatatctacaagtcttataaacttttttaagaaaaaaatttactagatagaaagtatatatatcaatcattcaggcactttctgaatttattatttaatcataattttcagaaaagttgttgacaaatgtaatttatgtctgtaagctatgaattaacttaaaaaaacacaaattacacacggtaataaggaaagtaaaacttacactgcagatacagagagtcttgtaagctgagaagagacattgaaagaaagtttgaaaatggcctttgagtgttgatgccaatatgaggtatcaacgggttcgcccgttatagcgatacagtattaacatttattgtttaatggcgtactggaatcatcgacgtcactaaattatcgttaatactcatttatcttcaaaagttaaatgagttttttattacagatatatctgatcatttacgataatgtgtgccactttttcaagtactcctaaaacataatggcgtactgtttgaggttactttagcaataaagtagtaaacaaaggtggtaccacgaaacaagctttcgtcctttacatccgatacatatcgggtttaaaggatggaagctttttttatttagaaaatgataggaggatttgaaatgaaagatactcaattagcacaaatttcattaacaaaggatttgactggcgcaattgctaatcccatttacttatcgacggcatatcaacatcctcacctaggtcagtctacaggatatgattacacacgaacgaaaaatccaactcgctcttcatttgaagaagcatttgccaaattagaaggtggtacagtttcatttgcaacgtcaagtggtatggcagcagttcaacttatttgtaacttatttaaacctggtgatgaaattttagtagcgtttgatttatatggaggaacatttagattatttgattattatgaacaacaatacggtattcattttaaatacgttgattttttaaattatgaagaagtcgaaaatagtataaataaacatacaaaagcactctttatcgaaccaatttcgaatcctcaaatgattcaaattgatgtagaaccctattatattctgagtaaaaaacatcatctattaaccattattgataacacgtttttaactccatacttatcaacacctttagaacaaggtgctgacattgttttacactcagctacaaaatatataggtggtcataatgatgtacttgcaggcgtagtgacagttaaagatgacacacttgctgaacaattaggtcaatttcacaatatgattggcgccacattgtctccacttgattgttacttgctccaaagaggtttgaaaacactacatctcagaatagaacgatctcaagacaatgcacgtcgtctcgcaagacgttgtgaaacatccgattctattgatgaagtactctatagtggaaaaacaggtatgttaagtttacgtcttaataaggcttatagcgtagctaaatttttagaaaatttagaaatttgtatttttgcagaaagtttaggaggaactgaaacctttattactttcccatatacacaaacacacgtcgacatgccagatgatgaaaaagacaaacgaggtattgatgaacatttaattcgcttatccattggtattgaagattataaggatattgaagcagatattattcaagcattagaaaattctaaagtaggagtgatttcatgagcttatctaaagaaacagaagtgatatttgatgaacatagaggtgtagattacgattcagcaaacccaccattatatgattcttcaactttccatcaaaaagtacttggtggtaacgcaaaatttgattatgccagaagtggtaatcctaatcgtcaattattagaagaaaaattagctaaacttgaaggcggtcaatatggatttgcttatgcttcaggtattgcagcaatatcagctgtattactcacattacaagctgaagatcatgtcattttaccagatgatgtgtatggtggaacatttagactaactgaacgtattttaaatcgttttaatattaaatttacgacggtaaatgcgactcatcctgaagaaattgaacaggccattcaacctaatacaaaattaatttatatagaaacaccatcaaatccatgctttaaaatcactgatattaaagcagttgctcatatcgctaaaaaacatgatttacttttagcagtagataatacatttatgactccattaggtcaatctccacttgcacttggtgctgatatagtggttcattctgcaacaaaattcttaggtggacatagtgatattattgctggcgctgctattacaaatcgtaaagacgtcgctgaggcactttacctactccaaaatggaacaggaactgccctatctgcacatgatagttggactttagccaaacatttaaaaacattacctgttcgttttagacaatctacattgaatgctgaaaagcttgtaaacttcttaagtcaaagagatgaagttgctgaagtgtattatccgggaaataatgatttacatttatcacaagctaaaagtggcggtgcagtcattggctttcgtctaaaagatgaaacaaaagctcaagcctttgtagatgcgctaactttaccacttgtatcggtaagtttaggaggagtagaaacgattctctcacatccagccacaatgtctcatgcagctgttccagaagaagtgagaaacgaacgtggcattacatttggcctattccgtctaagcgtaggtcttgaacaacctgaagaactcatagctgatattgactacgcattgaaggaggcatttaatgagtcgattattgaatcatttgaagaacaacgttttagtagctgatggcgcaatgggaacaatcctctattccgagggcctagatacttgtcctgaagcatataatcttacacatcccaataaagttgaacgtattcatcgttcatatatagaagcaggagctgatgtcattcagacaaatacgtatggcgctaactttgaaaaattaaaagtatttggcttagagcataaagtaaaagaaattcataaagccgctgtagaaattgcaaaacgcgcagccaataaagagacatttatcttaggaacggtgggtggcttcaggggaataaaacaagaagacttatcgctttctactattcaatatcatacagacaatcaaattgatactttaattgaagaaggtgtagatggtttactatttgaaacctactacgatttagatgaattaacgagtgtgataacagcgacacgtcaaaagtacgatattccaattatcgcacaactgaccgcttccaatacgaattatctcgttgacggtacagaaattaacgaggcgttaaaacatctcattgaatgtggcgcaaatgtggtgggcttaaattgtcaccatggcccacatcacatgcaacgctcattttcacatatcgaactaccagaacatgcctatctctcatgttatcctaatgcgagcctactcgatattgaaaatagtgaatttaaatatagcgacaatgctaaatattttggtgatgttgcacaagaattaattaacgaaggcgttcgtttaattggtggttgttgtggtactacaccggaacatatctcttacattaaagaatctgtaaaaaatttaaaaccgattaaaaataaaaaagttattccaattcatcgaacaattaatacaaatgcaaaacgtacattaaaacaaaatttaacatcaaaagtaaaacagagacctactgtgattgttgaattagacactccaaaacatcttgatacagaattgttctttgagaatataggtaagctagatgaagcaaatattgatgcagtaacactcgcagataactctctcgctactgtaagaatcagcaatatcgctgctgcaagtttaatcaaacaacaatatgatattgaacctcttgttcatatcacatgtcgagatcggaatctaattggtttacaatctcatctacttggcctttcactcatcggtgttagtgaaattttagccattacaggagacccttcaaaagtaggtcatctaccaggcgcaacaaatgtttatgacgttaactcaaaaggtctaacagaacttgcactacgatttaatcaaggtattaatgttgatggtgatgcgctgaagaaacataccaactttaacatcgccggggcgttcgatccaaacgttcgtaaattagacggagcagttaaacgccttgagaaaaaagtagcggcaggcatgagttactttattacccaacctgtatatagtaaagaaaaaatcaaagaagtatatgaagcaactaaacatcttgatatcccactttttatcggtatcatgcctattgcaagctacaataacgcacttttcttacataacgaagtgcctggaattaaaatgtctgaagatgtattaaatcaatttaaagcagtaaaagatgataaagaaaaaacaaaagaattaagtttgagactgtctaaagaattaatcgatacggtacatgaatactttaatggtttatatctcattacacctttccaacgtattgattattcattagagctcgcagcatattctaaagcaattacccaaaacaaggaggcaatatcatgacaacaattaaaacttcaaacttaggattcccaagattaggtagaaaaagagaatggaaaaaagcaatcgaaagctattgggctaaaaaaatcgataaaactgaattagatcaaacattaacagacttacataaagaaaatttattacttcaaaagaattataatttagacagtgtacctgttggtgatttctcattatatgaccatattcttgatacatcattacttttcaacattattcctgaacgtttccaaggacgtacagtagatgatgatttattgtttgatattgcacgtggtaataaagaacatgttgcaagtgcattaattaaatggtttaacacaaactatcactatattgttcctgaatgggataatgttgaacctaaggtgaatcgcaatatattattagaccgttttaactatgctaattcaattaatgtaaatgcacatcctgtcattgttggcccaatcacttttgtgaaactttctaaaggcggtagtcagtcttttgaagagaaagttcaaacattacttccattatataaagaagtattacaatctttagtagatgcaggtgctgaatacattcaagtcgatgaacctgttctcgtcacagatgaaagtgaaaattatgaaaatattactaaagaggcttatgactactttgctgatgctgatctaggagaaaaattagtcatacaaacctattttgaacgcgtgaatgtcaaattcttaagccgtttaccagtggctggtcttggtttagattttgttcatgatcatggttataacttagaacaaattaaaacaggagatttcgataaatctaaaacattatatgctggtattattgacggtcgtaatgtttgggctgcagatattgaagcgaaaaaagaattaatcgaaactttacaaccttatgctaaagcaattgtaattcaaccatcatcttcattattacacgttccggtatcattagatgatgaaacattagatacatcaattgaagaaggcttaagctttgctactgaaaaattagatgagttagatgcattacgtcgattatttaataataatgatagtaaaaaatatgatgagttaaaagcacgctatgaacgattccaaagtcaatcattcaaaaaccttgaatatgattttgatagcgtaccaaccagtcgtaaatctgcttttaaagatcgtaaaaaagcacaagacgctcgtttacatttaccagatttaccaacaacaacgattggctcattccctcaaacaagagaagtacgtaaataccgtgcagactggaaaaataatcgaatttcagacgaaaaatataacaacttcttagaaaatgaaatcgcacgttggattaaaatccaagaagagattggcttagatgtacttgtacacggtgaattcgaacgtaatgacatggttgaattcttcggtgaaaaacttcaaggtttcttagtcacaaaatttggatgggttcaatcttatggttcacgtgctgtaaaaccaccagttatttatggagatgtaaaatggactgcacctttaacagttaaagaaactgtttatgcacaaagcttaactgataaacctgttaaaggtatgttaactggtccagtcactatcttaaactggtcattcgaacgtgtagacgttcctcgtaaagtcgttcaagatcaaattgccttagctattgacgaagaagtattagcacttgaagaagcaggtattagagtcattcaagtagatgaaccagcattacgtgaaggcttaccattacgttctgaataccatgaacaataccttgctgatgcggtaaattcatttaaacttgcaacctcttcagtccaagatgaaacacaaattcatacgcatatgtgttattctcaatttggtcaaatcatccatgcaattcatgacttagatgcagatgttatttcaattgaaacatcacgtagccatggtgatttaatcaaagactttgaagatattaactatgatttaggtattggattaggtgtatatgatattcatagtccacgtatccctactgaagaagaaattgcaacagcaattgatcgttctttacaacaaatcgaccgttctttattctgggttaaccctgactgtggtctaaaaacacgtaaagaagacgaagtgaaagatgccttaacagtacttgtaaatactgttcgtaaaaaacgtgaagaaaaaaataaacctgtcgcataagatacagataaacatgtgagggagaaattgagttttctccctcttttattcttatattagactttcgaggtgaaacatatgacaaattatccattgtgggaccaattacaacaattaaaaacagcagagtgggtagatttaacccatactttcgatccagacattccacgatttagtgaatttgaaaaaggccaagtatccacgttatttacagtcaaagaacatggcttttatgtacaacgttggaatatcgttacacaatacggcacacacattgacgcaccgatacattttgtagagaataaacgttatcttgaggatcttgatttaaaagaattagtcttaccacttatcgtgttagattattcaaaagaagtaaaaaataatgatgactttatcgtgacacgccaacatttagaacagtgggaagcggagaatgggcgcattgaagaaggtacctttgttgctttacgtacagattggtcaaaacgttggccagatattgaacaattcgaaaatagagatactgatggtaaccaacatttaccaggttggggactagatgctttaaaattcttaattgaagaacgcggtgtaaaatcgattggtcatgaaacattcgatacagatgcgtcagtagatacagctaaaaatggcgatattgttggagaacgttatatacttggacaagataccttccaactcgaactcttaacaaacctagaccaattgcctacgcgcggcgcagtcatttatgcaattagtcccaaaccaaaagatgcgccaggtttccctgtccgtgcatttgctatcaaaccatcttaaatataagtgatatgttgataatgagcgatcaaatttatcactttcctatataatatataacatcctgatactaaagtacttgagcaagacgaagtatcaggatgtattattatttatattcattttcatattcttctctcaacaaactatacacataactatctgagaattacccttgtacacgttcatcacttctcaatataccttcttgtgtgaatccaagtcttattggtatagctcggcttttcttatttttagtagacatttgtatttcgattcgattaatatcatattcttcatatatatattgaataagtgctttagtgcatctagtcatgatacctttcttttgaaaatcttcagctaaataataaccaatcgaggtacgtttattaactaagtctaaataatgtaatccaataacaccaatcagttctttatcactccatattccacaatgaaatccattaccatcgataaattgttgtaaagctgaatggataaagtgtttactatcttccaccctctttgtatgttcgacaaaaggtaaaaattccgctagatatttgcggttactatctactaatttaaataactgctctgcttctcgttcttctaatatctttattttaatatctttatctatttgataaccaaagatcataactatcccacccgcttatataattattaatgaaccaaaaagaaaaaaacgctactaaagaggatatggaaatccatctccacgagcaaattgctgtaacactaaatggataaagtgtttactatcttccatcttcttcgtatattcaacgaatggtagaaattctgctaagtagtcacgatttgaatccacgagcgtaaataattgttccgcttctcgttcctctaatattttcagtttaatatctttatatatttgataaataaaaatatacagtactttatttcttttttcaaaatattcaataaattatacacatattaatatgttaagtttgctaaaaaatatgaatttattaaatatttttaaaattttatattgctctttattcgatatatgttaaccttttatacatctgttttattaaatttgaaaggagttaaatacatggaaaacaaatctaaacagttttcaaatgtgtttatttttgcttcagttattgtagggttactggtaattattggagccatcttccctaatcaatttggttcaatttctggagcaatcggaagttttattacagaaacgtttggttggtactatatgctacttattagcattattctgatattttgtatcacacttatttttcatccaattggaaagcttaagttaggaaaacctgatgataaaccagaatttaataccatttcatggttaacaatgctatttagtgcaggtatgggtattggacttgtattctatggatcttctgagcccatttcacattatctatcgccaccaacagcgaataaagaaacagaagctgctctagctgaagccatgcgttcaagtttcttacattatggactacatccttgggcagtttacggtattgttgcattggctcttgcatatacacagtttagaaaaaatgacttaggactcatttctcgtacattacgtcctattttcggaaataaagtagaaggtccattaggtactgttgtagatgttttagccgtgtttgctactattattggggttgcagtgtcacttggtgttggcgccatgcaaattaacggtggtttaaattatttatttggagtgccaaacaataaacttattcaaggcattattattcttattgttacagttttattcttaattagtgcttggagtggcttaagcaaaggtattcagtatttaagtaatttaaatatgcttttagctgcgatgttatttattattattcttattgtaggccctacaattttaattatgaatatgtttacatcctcaattggtgaatatttgaatactcttatttttaatagctttgatgttgctccacttaactcacaaaaacatgaatggttacagtcatggacgatttattattggggctggtggatgagttggtcaccatttgtaggtatcttcattgcacgtatttcaaaaggtcgttcgatccgtgaattcgttatagcagtattaggtgttcctacaattattagtatgctatggtttacagcatttggtattactggtattgaaattggtaagcaatctaaacatatctttagtatgccacctgaaacacaattatttggtattttcaatgagatgcctatgggtacaattttatcgtttatcgctattatcttagtaggctcattctttattacatccgcagactcagctacatttgtattaggcatgcaaacatcatttggtcgtttaaatccatccggttttgttaaaattgtctggggcgtgatgttatcagcgattgcctatgtacttttattatctggtggatcgacaggtctagatgcgctacaatctgctgctattatttcagcattaccatttagttttgttgttattttaatgatgatttcatttttcaaagatgcaaatcaagaaagaaaatacttaggtttaaccttacaacctgatcatcaacgtaaaaaggactatattaaaaataacacaactcaacaatctaaaatcaaataggacagaaactgagacatcattaaatatctcagtttttttattgatagccgatgattgaattgaacatgcatttgtcgcaagcttttttcaaccttagtcctcttttttggggacgacacattcaaaatgaattctatctactcttgtagtttgtataatatatcttctaaaactctactataaaataaaaggtcacagcgaattgaagacattcgttgtgactttatttttaaaatgttcctggattgaagttagtcttccattcattaaatggccaatatctccaaacgactttacctacaagttgttttttatctactagacctacaacatcaaatcggctatctatactattttgtctattatctcctaaaactaaatatttatctttaggaagtttcatttcaccatttgaacctttaatttgacttgatttaaatgagcctgttaaatattgaccttgtttgtgtttcttattgtaatctaaatacggttcagacacttttttattatttacatataattggtctcccttatattctactgtatcccctggtgtaccaatcacacgtttaataaaatcacgttttgaatcttcatgaaatacaacgacatcaccattatcaatgtgattcatagatttagaaattttacttataatcactttattgcgatcttgaaacgttggatacatcgaagacccagatactgtataggattcgccaataaactttgttactacaataacaaccagtagtcccactacaatggatataacccactccatgatttctcttttcacatttcatcccgcctatcatttgttttattctcgatggcttctactctatcatacatacttttcaaacacgtttcattcttcttacgattgatttctatttgaatctttcacattcgtaagatatccctcttactttgtaaggttagataaaggcaccgcttcattcactcttttaaaataagaagtgtaatagatataaggagtgatgagattgaaattattattaagaatcatattaactattcttgtcattattgtagtcattataggtggtttatttggattaaatgcatattcagaccaacatcctaacaatcgttctatcaatgattggaataaattaaatcccttagcaccaacgcatgagtattatgttaagactcaaaaaccatcaaaagtggaagtcattgataaggaaaaagacttctacatctaccattacaatcaaacaggttacaccaaagatggtaaagctaaaaacattgattacacagcgtctaaaaaattaaaacaacatcattacttagttgtaagcgaaaaatctcacaccattacatcatataaagaagtaaaacactcagacattccaactaaagcgaaagaaaaattataaaacttacaaggagtatgagaatcatgcctattttaaacgttaatcatgtatcaaaaatttatggaacgaaacaaaaatttaaagcactacacgatattaatttttcagtcgataaaggagaattcgttgccattatgggcccatctggttcaggtaagacaacccttcttaatgttatcagttcaattgatagcatttcagacggtactgtagaaatcagtggcaatgagataaaccagttgtctaataaaaaattagcacaatttcgtaagaaagaacttggttttattttccaagattatagcgttttacctacattaacagttaaagaaaatattatgttgccattatctgtccaaaaaatgaaaaaagatgaaatggaaaaaaactatcaagacgtcacagaggcacttggtatttatgatttaagtgataaatatcctagtgaaatttctggaggtcaacaacaacgtacagctgctgcacgtgcttttgtacatcgaccatccatcatttttgcagatgaacccacaggtgcactggattcaaaaagtgcacaagatttacttcatcgcttagaagatatgaacaaacaatttaatagtacgattattatggttactcatgatccttcagcagcaagttttgcacaacgtgtcattatgttaaaagatggcgatattcattcagacattcatcaacaaagtaaaacaaaatctacattttacaatgaaattattcaattacaatcagccctaggcggtgtggcaaatgacgtttaatcaaattacattaaagaatttaaaaagtaatatcaaacattatgtattatatcttttttcattaatcttaagcatcatcttatattttagttttgtcacattacaatacacacatagcttaaataatggttcatcaaaaataatcaatcaaggtgcaaaagttggttcagtttttttattcattacgattatcattttcttaatgtatgcgaaccatctatttattaaacgtcgtacacgtgaatttgcattattcgaactcattggactaacacgtggtaacattcttagaatgcttgctatcgaacaaatcactttatttattagtacaggcattattggcgttatcattggtattttaggttcaaaattattgctttcaatattaataaaactgatgcatttacacattcatgcatctataggatttgaagtagctgctttaattcaaacaatgatcatgctaatgttagcgtttattttaattatgttagaagatgcgatctttttaaaacgaagaaccatactttctatgatgaaagacagtatgaaaacagaagcagtaaaagcgaaaatcaccacgccagaatgtattgctggtattcttggactcataatggtgatgttaggttattatatgtctacagaaatgtttggtaaatttcaagaattaacgatggccttattaacgccatttattattttattcttaactgtagcaggcgcatatttgtttttcagaagttcagtttcaattatttttaaatctttaaaaaaatcaaaacatggtcgtgtctctatcactgatgtcgtctttacatcttcgattatgtatagaatgaagaaaaatgcgatgtctttaactattattacagtcatttcagcagttacagtaacaatattgtgtttcggagcaattagtaaagcaaatgctgactttaatattcaatcatcgtcacctcaagatattaactttactaaagtaaaggtggcccaacaatttgaacatcaacttaaccaacacgatataccctatacaaaaaaaacgtatgaaaatgccaatacccatattattgaaaatgatgtcattaaaagtaaaacgggtaatgcaatgcaaaatgaaagtatatcaattatggctgatcctcatatcgaaggtcatcacgctacaattacaaatttacaaggtccactttcaatgatgtttaatgttcaaattcataaagatttaaaactaaaagggcaacaagtaaagacattttatgtagataaaaaagatttaaatgaaatcattccaatggatgcttcactgggtggaccagtacttaaaattagcgcagacaactataatgctttaaaaacaaaaaatcaacttacacatcattatggttttaatattaagcatcatagcgatctttcaaaagctgaaacattagctaaaaaaggaaaccaaaatgtagttttaaaaagtgaaaccaaaaaagcaattgatgaaagtaatggcattcttatatttgtcacttctttcttaggtcttgcatttttagtggcagctggttgcattatttatattaaacaaatggatgaaactgaagatgaaataaataattatcgtattctgcgacgtattggttttacgaatacagatatgataaaaggactagctttaaagattatattcaatttcggtttaccattagtggtttctttacttcatgccttttttgcagcaaacgcatttatgatcttaataggcaattatacattgacacctatcttcattgtcatgattatctattcactcgtatatctgatatttgcagttatttcgttcattcattcagaacgcatcattaaagacgccatttaaataataaattgaaaggacatgttaaaatgactattaaagaaatgattcaacacgcatatgacgacttagtaagtttaaaagtaaattggtttaatggtatcatgttagctctgatagtattagttattagtagtattacaacgccatttcttggtgtgcccgtaggcttacttggcggtggctatattttgaaaagatacgaaaaaaataaccattagaataaaaaaggaagctcaaaatgaattgagcttctttttcattaatattttaaaaatatctctgttaaatatagactcaaataacacatacataaaaataaacccactacaaaaataaaagataatatactagtaaatatatttcttttttcactagattttacttcgttcggatctttaccattcataaaagctactattctatcgtagttatctaaattgtatttatacttaattttatctatttgagtactactataaaagctaattaaaaaaagaatagcaattattataaaaccccataaattaaaataatataagataggacctataagcatagaagacaaagtaaatccaataatcataactaacgaccaaatgttcatttttctttttatagattcttgtttatttgaatttaaatctcctctaactaaatcatctagtgagatatcaaacaactcacacattactagtaaattatgaatatccggataactcttttcattttcccaatttgatattgtctgtctagaaacatataatttttccgctaagtattcttgagaatattcatctctttctcgatattttcttatttgttgaccgatatccattcattcacctcgttataaattaaactatttttatttgatttttaaaatcataatactacatttataaaagcgttttttctaataaaaatctatcaattttcttttacattatcttagttttagtgtaaaaaatgttttacattttagtatattgcaatatctttggatctttagaacaaatataagcaaagtattggtggtgaaattcctaaatgggtaggacaaattaaagattgagaccttaatcataaataaacattaaaagactttgagttgagatagactgaaactatcccccaggaaagtgaaatcgtataatactgattattaataaaaaaacccatagattaataaaatcatctacgggttatataaaagtaagatttatactctactttcttatagtttcaatatttttactattcaatattatatgcatctaaaattacttttaataactttttaatataagcttcattaaggacgttaggtttaatcaatatattgaaataaatcggtgaaaaaattaaatcaataaataaatcttggtctgcttcgtcaatatatttagaaataatagtcttcaatattttacgattgctatcaaaataacctttcataaatatgtcacgtgcctcagattgttgatgactaattaatatttcaatcacagcacgccctaaatgagtttgataaatattcataattcttattagaaaatgatacaattcatcgtacatcgttttataatcattttcaaaaacgtgaattcgacttacaaacatatcgacaataatagatgatttatctttccaacgtctataaatcgtcgctttagaaacaccagtattttcagaaatttgatctattgtaatctctctaaaataagtcgtttctaataactgatcaatttctttaaatatcttttcattgattgttggatctttcggtcttccagccatcttttctccttcttaaacgtgaaatcaattctaccatttcaaagataattactgcactcataaaccatacaacaaaaccaaccaaaatactaagcaaccactcatgtgtagaatataacattgcccatgttgctaagatactacataatacaccagtcataccaaaaactgcacctctactaacatgtttggcaacgacattcccatgttgcataccagtaataaataaagaaacaagaaatactgcaggtaatgtggcaaaaacgccacctaattccttccaaggtagcataactgaaataatataacttaacataacggctaaaccacccacgagaaatttgataaaagttaatttcattaaaaagtcctccaaatattaagaaatatgtcgtactgcaaaaatagcaattgaaatgactaaccaacaaataaatgcaaacgctgtaccttttttataatctcgtttacttatataaatcgacgtaatcaatactgtaataatgcaagaaataatacctattatagctcctgaactaagatgtatcgacatttgaatcagccgttctcctcgatgatctatggctaaagcaataatagctgctaggtagactgccggcatagtcgcaataatgccacccattttccctcctactttctcagccatcatcgatgcaaaggcaacagcgatacctccaatcacaaaatgaagtatcgcacttgaaattgatattccgaacacatgaaacccttcttaccttaattaataaacgatacgtttcgtttattaatattgtaattctattttcaaactatgtaaatatgaaataaaaaaatcaattatgataaaatatttgacaaaaaaagaacaggatactgaatgtaccattcattctacctgttcttttagtcattaacgtttatatagttttattttaatttcataataatcctcatgatctttatcacgatgctcaacatgaatacccgagttttcaattgcttgaatactcttacccacttcatcacgtgcttgtgttaaatctttagcaaattggaatgtttttgcttttactttttcagggcctaatttttgtttcacacgagcttctgtctgtttgacattcaatttctgagcaataacttgttcaatcaattgttcttgatccgcttcttttaaggataatactgcgcgtgcatggcgttctgtaattttaccttcacgtaatcgtacaattacttttggtgctaatttaagtaagcgtaatttattagcaataaaactttggctttttccaagactttgcgctaactcactttgagtggtctgtccaatttcaagtaactttttataagcttcggcttcttctattgcagataaattttcacgttggatattctcaataagggctactacagcagtttcttcatcattcatatgtcgaataatgacgtctgctttagattgatgcaaggattgtaatgctctaaatcgtcgttcaccagcaataatttcatacatattctcttctataggtcgaacgacaatgggttgtaataacccatgttcttctatcgactcagcaagttctgtaattttacttgaatcaaacacttggcgcggttgataacggttaggtacgatacgctctatttgaatggattccacacttgaatgacgattttcttcaatataatcaacgatgtcttctttattttttaaaccaaatagtttagaaaaaggttttttcattgtccattcactcctcttaaaatcaattttaacatgagtaaccgaaaaattgattaattttctaataaaggagctttattaggcgtaccaggttttctaggatattttttaggtgtttgacggcgcttatccactataatcatttgtcgttcacctgcatcttctggtaaatcaaacgtataagaatcactaaactctccacctaagatgcttataccaaattgtgcttctgctaattcttcttcaccttttgcagactttaatgcaataaactggccgccttttttaactaacggcaaacataactcacttagaacagtaagtcttgccactgcacgtgctgttaccacatcatatgtttctctattgacacctttaccaaatgtttctgctcgatcatgaacaaaacttacttgggttaatccaagttcaactgctaaatgatttaaaaactgaatacgtttatttaatgaatcgacaatggtaactttcaattctggaaaaacaatttttaaaggaatgcttggaaatccagcgccagcccctacatcacaaagtgttaatggctgattaaaatcatagtaaaatccagctgtaatagaatcatagaaatgtttcaagtaaacttcatgctcatcagtaatacttgttaaattcattttttcattccattcaacaagcaaacgataataggtttgaaattgttgttgttgttgatctgttaattcaataccttgctcacttaacgcttttgttaaccattcgatgccactcattaatttttcaccctttgtaatttaccttgttctaaatatacaagtaagatagaaatatctgcaggattaacacctgaaatacgtgatgcttgcgcaatatttaatggtttaacctctgataatttttctcgtgcttcagtggctaaactatccactttactataatctaagtcttctggaattttcttttcttccatacgtttaactttttcaacttgttgtaatgatttattgatataaccttcatatttcgtttgaatttcaacttgttcttctaccgcttctggtaactgatgcgtttcttctaatatctctaaaattgtattatacgtcatttcaggacgacgcaataaatcaatggctaagataccatcttttaagcgagaaccaccgtgagcttcaatcacagattgcgtatgttcattcggtttaatacggatatttgataaacggtcaatttcatcttgaatttgttgacgtttatcattaaaacgtgcataacgttcttcagaaatcatgcctaagtcataaccaatatcagttaaacgtaagtcagcattatcatgacgtaataataagcgatattcagcacgagaagtcaataaacgataaggctcattcgttccttttgttactaaatcatcaattaagacaccaatataagcatctgaacgacttagaattttttcgcctgtacctaatacgttacctgcagcattaatacctgccataatgccttggcctgctgcttcttcataaccagatgtaccattaatttgccctgcagtgtataagtttttaatcattttagtttctaatgttggccataattgtgttggcacaatcgcatcatattcaatcgcgtaacctgcacgcatcatatctgctttttcaagacctggaatagtagccaacatttgacgttgaacatgttcaggaagactggttgataagccttgcacataaacttcattcgtattacgtccttctggttctaagaaaagttgatgacgtggtttgtcgttaaaacgtacaaatttatcttcaatagatggacaataacgtggacctgtacctttaatcatacctgaatacatggctgataaatgtaaattatcatcaataactttatgtgtacgatcatttgtatacgtgagccaacaaggtagttggtctaaaatgtattcggtagtttcaaaactaaacgcacgaccaacgtcatcgccaggttgaatctcagttttagaataatcgatggttttagaattcacacgtggcggtgtacctgttttaaaacgcacaacttcaaacccaagttctcttaaattatcagctaatgaaatagatggaagttgatggtttggaccacttgaatatttcatattccctaaaatgatttctccacgtaagaatgtacctgtcgtgatgactacagctttcgcatgatactctgtacctatgttcgtacgtacacctttaacttcctcattttcaatcaataattcgtctaccatgccttgcatgatatctaagttatcttcatcttcaatgacacgtttcatttcttgttgataaagcactttatcagcttgagcacgtaatgcacgaactgctggacctttaccagtattaagcatacgcatttgaatgtgtgttttatcaatggctttagccatttggccacctaatgcgtcgatttcacgtactactattccttttgctgggccaccgactgatgggttacatggcataaaggcgatattatctaaattaatggttaacattaacgttttagcaccacgtcttgctgaagctaatcccgcttcaattccagcgtgaccggcaccaataacaattacgtcatattcttgaaccattgaattgacctccctattttttcttaattattattattcattttagactactgatcgtcttaatttttattatttacctaaacagaattgactaaatagctgattaattaattcatcacttgctgattctccaataatttctcctaataattcccatgtacgcgttaaatcaatttgaaccatatccataggaataccagcttcagctgcatcaatagcatcttgaattgtttgtcttgcttgttttaaaagtgagatatgtcttgaatttgaaacataagtcatatcttgattttgtacttctccaccaaagaacaaatctctgatttgtaattctaattcgtcgacaccttcttgttttaacattgatgtttgaataagtggtgtgtcccctatcatagttttaacttcttcaatatctaatcgacgctctaaatctgttttattaacgataacaatcgaatcttcattttttatgacttcatataatgtacgatcttcttcagttaaaggctcgttgttatttaatacaaaaaggattaaatctgcttcacttaatgctttacgtgagcgctctacgcctattttttctacaatattttcagtatcacgaatacctgctgtatcaacaagtcttaacgggacaccacgtacattaacgtattcttctaatacatctcgagttgttccagctacttcagtgacaatggctttgttatcttgaataagattatttagcattgaagatttacctacattcggtttaccgacaatcactgtagataatccttctctcataatcttaccttgagtacccgtttctaataattgatcaatttcatttttaatttttttagactgcgcaagtaaaaattccgttgttgcatcttcaacatcatcatattctggataatcaatgttcacttcaacttgggcaagaatttccaatatcgattgacgttgtcgtttaattaaatcactcaaacgaccttcaatttgattcattgctactttagaggctctatccgttttagaacgaatgaagtccatgactgcttctgcttgagataagtcaattcgaccatttaaaaatgcacgcttagtatattcgccgggttccgccattctagcgccatgtgtcatggtaagttctagtatacgattaattgtcaaaatacccccatgacaattaatttcaataatatcttcacgtgtaaaggtctttggtgcacgtaaaactgaaatcatcacttcttctacaacttcatctgtctcaggatctataatatggccgtaattaatagtgtgtgagggaacatcttttaattttttctttcctttatataacttatctcctatttcaaccgcttctggaccagacaaccgtacaataccaattgcaccttctcccattggagttgaaatacttgtaattgtatcaaaatccattatccattctcgcctccctagttaagtaaaatttcaatataatattgtaataagtttctaattaaattgcgaatatattgttttataatctactggttagtcttcggtttgtctaacattagacttccgttagtctaaatttatttaattctcttattaaatacctttgctattttcaatacatgttctaaactgccttgaatctctaaagttgacatgtttttagcaggttgtctcgctattacaataatatcttttgaaatcatatcttgcttatgcactttaaaattttctctaatggcacgcttaatacgatttcgagttacagcatttccgattttcttagaaacgctaatgcctaaacgaaaatgttcatactcattctttagtgtataaacaacaaattgtctattggctacagattttccctttttatagattttttggaaatcactgttcctttttatacgataagctttctccatgcttaaatcactcgcttacattgttctttatgttacatttatctattaaaatgcgttggtttaaaacgaaaaaaaagaccactgagaagtcagtgatcttatgctgataaaactttacggcctttacgacgacgacgcgctaaaactttacggccatttttagtgctcatacgttttctgaaaccatgaactttactatgtttacgtttatttggttgataagtacgttttaccatgcaaaacacctccatctacatattatatcgcgttcactaaatctacttctaatgaacctgactattttaatagataaatgataattgttaatatcaaataattttgatttaattcgattttatctagtcagaattcaagcaactactacaatataacaaattaccatttataaagcaagcagcttttgaaatcaattaatgattttcaagacgctctcttagttatatcattttcatttttaatatttatacatttcattgatttagtagtttctcaattttatacatatttaatacacgtttataaattatttcccaaacctgttatagtacattgaattatggtatcattttttatccacttattcacatatagtatttaattttttgtggataatcaatagcatattcacagatttataccaaatttacaaacatattcacagccatttgacatctattgcagttaaaaagtataattgtgtggataagtcgtctgaatcatttatcttataggatttttttataaattctatatgtgtttttactgtgtataaatcatagcatatataaagttatccaccgaatgtgattaacttgtggataattattaacatgctgtgattatttttatccacgcttataaaaactgtgtataagtcttaaatttatagaaagatggagtttatatatgtcggaacaagaaatttggaaaaaggtattagaagtagctgagtcagagatttcgaaaacaacgtttaatacgtttttaaaagacactgaacttaaagaaattcgcgacaatgttgcttacatctttgttattcatgagttttacgctgattggttaaactcaaattataaagatgtaattcaaacaattatgaaagacatcattggttatgaagttgatccaaaattttacactgctgaacaacttgctgaacttgacgaaacgagtcgtaaacaatcaaatactgtaaaaaaaacgtctgccattgatgatagtcatgatgatatggatcaatttaatacgcataatacgtttgatacatttgtgattgggcctggcaaccgcttcccacatgcagcaagcttagctgtagctgaagcacctgcacaagcttataatccattatttatctatggcggcgtaggattagggaaaacgcatttaatgcatgccattggtcatcacgtactaagtaataaaccgaatgccaaagtgctgtatacttcaagcgaaaagtttacaaatgattttattaaatccattcgtaacaatgaacctgaagcatttagagaaaaatatagaaatatcgatgtattattaattgatgatattcaattcattcaaaataaagaacaaacacaagaagaatttttccatacatttaatgaattgcatcaaaataaaaagcaaattgttatttcaagtgatcgtccgcctaaagaaatagcaaaacttgaagatcgcttacgttctcgatttgaatggggtctcattgttgatatcacaccgccagattatgaaacacgcatggccatcttgcagaaaaaaatcgaagaagagaacttagaaattccagcagaagcattgaattatattgcaaatcaaattcaatcaaatattcgtgaacttgaaggagctttaacacgtttacttgcttattcaaaattacaaggtaaaccgattacaacagaacttgctgctgaagcattaaaagatattattcaagttcctaaatctaaaaaaatctcgattcaagatattcaaaaagtagttggacattattacaatgtacgcatcgaagattttagcgctaagaaaagaacaaagtcgattgcctatccaagacaaatcgcaatgtatctgtctagagaattaactgatttttcattaccaaaaattggtgaggaatttggaggacgcgatcatactacagtgattcacgcacacgaaaaaatttcgaatgatattaaggcggattcaatttttaagcaagaagttgaagatttagaaaaggaaatacgtaaacagtaataggaaatatgaatctgttgtataacagtgttgctaaaatataacattcaatatcaaagatgactatgcttctaaataattttataaatatagcaaggagttagaaaatgttaaattgtggataatgtgaaaaattaatacacatcattaacaacttatccacatgtgcataactttgatataaaaggtgtttcgttagatatccactaatccacaagccctactactattactatgattttaaaacctatataatttaagtataaacgactggaaggagtttaaattaataatggaatttacaataaaaagagattactttattacgcaattgaatgacacattaaaagcaatctcaccaagaacaactttaccaattttaacaggtatcaaaattgatgctaaagataataacgttattttaactggttctgactcagaaatttcaattgaaatcacgattcctaaacaagtagatggagaagatattgttgacattactgaaacgggatcagtggttcttcctggtcgtttctttgtcgacatcattaaaaaattaccaggcaaagatgttaaattatcaacaaatgaacagttccaaacgcttatcacatcaggacattcagaatttaatttaagtggtttagatcctgaacaatatccattgttaccacaagtatcacgtgatgatgccattcaattatctgtaaaagtacttaaaaacatcattgcgcaaacaaactttgcagtgtccacctcagaaacacgcccagttttaactggtgtgaactggcttatacaagataatgaattaatatgcactgctactgattcacatcgtttggctgtaagaaaattaaatcttgaagatgaatcggaaaacaaaaatgttattatcccaggtaaagcattatctgaattaaataaaattatgagtgataatgatgaagacatcgatatcttctttgcctctaatcaagtattgttcaaggtcggtaacgtgaactttatttcacgtttattagaaggtcactatcctgatacaacacgtcttttccctgaaaactatgaaataaaattaggattagataacggtgaattctatcatgcgatagatcgtgcgtcattacttgcacgtgaaggtggaaataacgtaattaaattaagtactggaaatgaggttatagaattatcatctacatcaccagaaatcggtacagtaaaagaagaagttacagcaactgatgttgaaggtggcaatttgaaaatttcattcaactcaaaatatatgatggacgcattaaaagcaattgataatgaggaagttgaagtagaattctttggtacgatgaaaccatttatcttaaaaccaaaagcagatgattcagtcactcaactcattttaccaatcagaacatattagtgattaaagagtaattaaaaagttaaagtagaatagagttcttattgaattactgttctacttttttattgattaaaacagtcattttaaactatctcagaagttcatagtgaagctaaattaagtaaaacgtggtttttatccacaactcattatattcgctaaaataggccttaaaattaaaaattgagatattatctttgattatttttgtcataatttcaaaaaatgatctattttttacataacaatttaaaatgataaaacttattcgaaagtaaacggtttcatacttcattttaaatgaaatttattcctaaaaaaggtataatatagtaatgatatataaagaaatggagtgattattttggttcaagaagtaatagttgaaggcgagattacgttaggtcaatttcttaaaacagaagggatcattgaatcaggtggacaagcaaaatggttcctacaagattacgacgttttattaaatggcgaacgtgaaacacgtcgtggaaaaaagctagctgaccaagatcgtatcgacttccctgatattccagatatcgattcatttattattattcatcaaggtgagcaatgaaacttaaaacactccaattagaaaactatcgtaactatgaagcggttacgttaaattgtcatcctgaagtgaatattcttattggagaaaatgcacagggaaagactaatttacttgaatcaatttacgtccttgctttagctaaaagtcaccgaacctccaatgacaaggaacttatacggtttaactctgagtatgctaaaatagagggtgagctaagttatagacatggaaccatgccattaacgatgtatataactaaaaaaggtaaacaagttaaagtgaaccacttggaacaaagtcgactcacacagtatgttggacatctaaacgtggttctttttgcacctgaagacttaaatattgttaaaggttctcctcaaattagaagacgatttatagatatggaattagggcaaatttcggcagtatatctcaacgatttagctcaatatcaacgtattctcaaacaaaaaaataattatcttaagcagttacaacttggtcaaaaaacagataaaacgatgctagaagttttaaatcaacaatttgcacaatacgcacttaatgtcactttaagacgtgagcaatttattgaagaattagaggctttagcacaacctatccacgctggtattacaaaccaacgtgaaacattatctttaacatatttaccaagtattaaacttagcgatacaagtaaaaataagagtgaattattagatgaagtcatcacgttattgaatgaatatcaacaacgtgaaatggatagagcaatatgtttatacggtccacatagagatgacttaggatttaatgtgaatgacatggatgcccaaacttatggatctcaaggtcaacaaagaacaaccgctttatcaattaaactagcagaaatagaattaatgaacattgaagtcggagaatatccgattttattattagatgatgtcttaagtgaacttgatgattctcgtcagacgcatttactcagtacaattcaacataaagtacaaacattcgtaacaactacatcggtagacggtattgatcatgaaatcatgaataatgcgaaactttaccgaattaatcaaggtgaaattattaagtaatagaaagtgatggtggatacattgtcagatgtaaacaacacagataattatggtgctggacaaatacaggtattagaaggacttgaagcggtacgtaaacgccctggtatgtatattggttcaacttcagaaagaggtttgcatcatttggtatgggaaatcgttgataatagtattgacgaagcgctagctggatatgcgaaccaaattgaagtagtgattgagaatgacaactggattaaagtgactgacaatggtcgtggtattcctgtcgatattcaagaaaaaatgggacgtcccgcagtagaagttattcttactgtgcttcatgccggaggtaaattcggtggtggcggatacaaagtatctggcggactacatggtgtaggttcatctgtagtaaatgcgttatcacaagatttagaagtgtatgtacaccgtaatgaaacaatttatcatcaagcatacaaaaaaggcttgcctcaatttgatcttaaagaagtaggtagtacggataaaacaggtacagtgattcgctttaaagcagatagtgaaatcttttcagaaacaacagtttataattatgaaacacttcaaaaacgtattagagaattagcattcttaaataaaggtatttcaattacactaagagacgaacgtcaagatgaagaaccacgtgaagacacgtatcattatgaaggtggtattaaatcttacgttgaattactgaacgaaaataaagaacctattcatgacgaacctatttatattcatcagtcaaaagaggatatcgaagtagaaattgcaatacaatacaatagcggttatgctacaaacttattatcctatgcgaataatatccacacatatgaaggtggtacacatgaagatggctttaaacgtgcacttacacgtgtcttaaacagttatggaactcaaagtaagattattaaagatgataaagaacgtctttcaggtgaagatacacgtgaaggtttaacagcagtcgtctctgtaaaacatggtaatccacaattcgaaggtcaaacgaagacgaaattaggtaactctgaagtacgtcaaatcgttgatcgattattttcagaacactttgaacgctttttatatgagaatccaaatgttgcaagagtcattgttgaaaaaggaattatggcgtcaagagcacgtgtagcagctaaaaaagcgcgtgaagtgacacgacgtaaatcagcattagaaatttcaagtttacctggtaaactagcagactgttcaagtaaaaatcctgacgaaagtgaaatcttcttagttgagggtgactctgccggggggtctacaaaagaaggtcgtgactcaaaaacacaagctattttaccattgagaggtaaaatattaaatgtggaaaaagcacgtttagatcgtattttaaataacaatgaaatccgtcaaatgattacggcatttggtacaggcataggtggcgagtttgatatttctaaagctcgttatcataagattgttatcatgacagatgctgatgtagatggtgcgcatattcgtacattattacttacattcttctacagatttatgcgtccattaattgaggctgggtatgtatacattgctcaaccaccattgtataagctaacacaaggtaaacaaaaatattacgtctttaacgatcgtgaattagataaattaaaagctgaactaaatcctactccaaaatggcaaatttctcgttacaaaggtttaggtgaaatgaatgccgatcaattgtgggaaacaacaatgaaccctgaaaatcgtatgatgttacaagtaaaacttgaagatgcagtagaagcggatcaaacatttgaaatgttaatgggtgacgttgttgaaaatcgtagacaatttatcgaagataatgcagtttatgctaatttagatttctaatttaacttaatgtgaactgactataaaaggaggatatcttgatggctgattctctaccacaatcaagaattaatgaaagaaatataaccaatgaaatgcgcgaatcatttttagactatgcgatgagcgttatcgtttcacgtgcattaccagatatacgtgatggtttaaaacctgtacatcgtcgtattttatatggtctaaatgaacaaggaatgactccagacaaaccttataaaaaatcagcacgtattgttggggacgttatggggaaatatcatccacacggcgactcttcaatttacgatgctatggtaagaatggcacaaacctttagctatcgttatcctcttgttgatggtcaaggtaactttggttcaatggatggtgacggtgctgcggcaatgcgttataccgaagcaaaaatgaccaaaatcacattagaactgttacgtgatatcaataaagatactattgatttcttagataactatgatggtacagaaagagagcccgaagtcttaccttctcgtttccctaaccttttagtgaatggcgcttcaggtattgcagttggtatggctacaaatattccgccacataatttaacagaagtcattgacggagtcttacgtttaagtcaaaatcctgatgtcacaatctcagaattgatggaagacattcaaggtcctgattttccaacttctggcttaattttaggtaaaagtggcattagacgtgcctatgaaactggtcgtggatcgattcaaatgcgagcacgtgcatcaatagaagaacgtggcggtggccgtcagcgtattgttgtgactgaaattccatatcaagtgaataaagcaagaatgattgagaaaattgcagaattagcgcgtgagaaaagaattgaaggtatcacagatcttcgtgacgaaacaagtttacgtacaggggtaagagtggttattgatgtacgtaaagatgccaatgcaaatgttattttaaataatttatataaacatacaccattacaaacatcatttggtgtaaatatgattgcccttgtgaatggtcgacctaaattaattaacttaaaagaagcgcttgttgaatatttagaacatcaaaaaacagttgtacgtcgtcgtacagaatacaatttgaaaaaagcgaaagatcgtgcacatatcttagaaggtttaagaattgcgctggatcatattgatgaaattatttctattattcgtgagtctgacacagataaagtggcgatggaaacattgcaagaacgttttaaattgtctgaacgtcaagctcaagccattttagatatgcgtttacgtcgtttaactgggttagagcgcgataaaattgaaaatgagtataatgaattattaagttatattgcagaattagaagagatcttagcaaatgaagaggtattacttcaactggttcgtgatgaacttacagaaattaaagaacgtttcggtgatgaacgtcgtactgaaattcaattgggcggtttagatcacttagaagatgaagacttaatccctgaagaacaaatcgtcatcactttaagtcataacaactatattaaacgtttacctgtatctacatatcgttcacaaaacagaggtggacgaggtgtacaagggatgaataccttagaagaagactttgtcagtcaacttgtaacattaagtacacatgataatgttttattctttacgaataaaggccgtgtttataagttgaaaggatacgaagtacctgaattatctcgtcaatctaaaggtattccagtcattaatgcgattgagcttgaaaatgatgaagtgattagtacgatgattgctgtaagagatttagaagatgagaacagtttcttagtctttgctactaaaaaaggtattgttaaacgttctgcattaagtaacttctctcatattaataagaatggtaaaattgcgattggctttaaagaagatgatgaattgattgcagttcgtcttactgatggtaaacaagatattttacttggtacagcacatgcctcattaattcgattccctgaaaatagtttacgtccactaggtcgtacagcttcaggtgtgagaggtatttctctaagagaaaatgacgtagtcgtaggtttagacgtagcctatgctgaaagtgaagatgaggttctagttgttactgaaaaaggttatggtaaacggacacctgtaagtgaatatcgtttatctaatcgtggcggtaaaggtataaaaacagctaaaattacagaacgtaatggtaatgttgtatgtattacaacggtaagcggtcaagaagatttaatgattgtaacggatggtggcattattattcgactacaagttgaagatatttctcaaaatggccgtgccacacaaggtgtgcgattaatgaaattaggcgataatcaagccgtatcaaccgttgcgaaagtcattgataaaactgaagatgaagctgcaactgaagcggctcaacaaacagaacatgcaagtgcccaaacgacagaaagtgcaaatgaacaagtgatagatgatacgacacctggtaacgctttgcatactgaatctgatgaagatgatgaacgcattgaagtaagacaagatttcatggatcgtgtaaatgaagatattgagaatgattcagatcagaattaaatataaaaataagacttccctatacgtgggaagtcttatttttattatttatctttctaattctttcattacataaggaatttgattaattaattttgaagggggcacgacgtacattttttcagaaagtttttcaccaatataactgtgaatataagttgcgctcgtaacggcatcttgtaagttattaaattgacctacaaaacttgtaatcataccagctaatgtatcacccataccacctgtagccattgcaggtgtgccaatgggtaatttgtattctttatctttaaagaagatttctgtaccgtgtttttttagtactacagtagcgcctaatttatccacagcttctctatttctttcatacgtttgttcttcaataggaataccacttagacgttcccattctttttgatggggtgtaaagataacacgacatgtaggaatatcaggtttaagtttacaaaatattgtaattgcatcaccatctacaattaagttttggtgaggttgaatattttgtagtaagaaagtaatcgcattatttcctttgaaatcaacgccaagacctggtccaattaaaatactatctgtattctcaatcatttttgttaacattttagtatcattaatatctattaccattgcttcaggacaacgtgaatgaatggctgcatgattagtaggatgtgtggctacagtaattaaaccacttccactaaaaagacatgcacgtgcagctaacatgattgctccgcctaaattttcactaccaccaattaaaagaatttttccataatcacctttatgcgtttcgtcattacgtttaggaattgtcacattagttaatgtttccatatgatgaatcctccctatttagattcgaaagtcataacttctatatattaaatcaatgaaatgatgagttattaagacaagcgaaaatatcatgtgcgttttaagtacaatagaaaatattatacctgcttaagcgtttcgtcaacactattttaaataaatttataaatgctaaaattgatagatattaacgtatatagtttgttatatttggaaaaggtaactgcttgaaaattatatatgactttgctatattaaaattaagttaataaagtattgttcgtaggctaagtaacataagggtattaatttcagagagcttgtggtgagtgtaaacaagtaattaatttttatgcgaatctacctacttatattgaacaatcggttttaaccgttatcgatagtggagtgcaatttagtttatttaattaaattgttaaatagggtggcaacgcgtagaccacgtcccttgtatggggatgtggtctttttttattttaaatcgctatggtcactcaatataaattttttggaaggatgaatatgatatgttagacatcaagcaattcagagacgaaacggacaaagttaagagcaaaattgaattacgaggagatgattcaaaggttgttgatgaagtattagaattagataatcaacgtcgtgatttaattggtaaaacagaagaaatgaaagcacgtcgtaacaaagtaagtgatcaaatcgctgaaaaaaaacgtaacaaagaagatgctgatgacgtcattaaagaaatgcgtgaattaggcgatgaaattaaagaaaatgatgcaaaattaaatgaagtagataataaaattcgtgatatcttaattcgtattccaaacttaattgcagatgacgtaccacaaggtgctgacgatactgaaaatgttgaattaaaaaaatggggcacgcctcgtgaatttgattttgaaccaaaagcacactgggatttagtagaagaattaaaaatggctgatttcgaacgtgctgcaaaagtatcaggtgcgcgcttcgtttatttaactaaagacggtgctttattagaacgtgcattaatgaactatatgttaacaaaacatacaacacaacatggttatacagaaatgatgacacctcaattggtaaatgcagatacaatgtttggtacaggccaattacctaaatttgaagaagatttattcaaagttgaaaaagaaggcttatatacaattccaactgcagaagtgccattaacaaacttctatagaaatgaaattatccaaccggatgtgttaccagaaaaattcactggtcaaactgcatgtttccgtagtgaagcgggatcagctggtagagatacaagaggtttaattcgtttacatcaattcgataaagttgaaatggtgcgttttgaaaaacctgaagattcttgggatgcattagaagatatgactcaaaatgccgaagcaattttagaagaattaaaattaccatatcgtcgcgtgatcttatgtactggagatattggtttcagcgcaagtaaaacatatgacttagaagtatggttaccaagttacaatgactataaagaaattagttcttgctcaaactgtactgatttccaagctcgtcgtgctaacattcgtttcaaacgtgatgcttcttctaaaccagaattagtacacacattaaatggtagtggacttgcagtaggtcgtacatttgcagctatcgtagaaaactaccaaaacgaagatggttcaattacaattccagaagcacttgtaccatttatgggcggcaaaacagaaattcgtccagtcaactaatcattaaatagaattcaactcataaagtgatagagtgacgtagtcctctatcgctttatttatttttatattaaaataagactgccctgagaaaggtaactttaaaaaatatcaaaaatttctgatattttaaaagtattgaagtttcaatattttaaaacatccttctctctaacctcactcaaacagacgtctaaagatattgaagcgcctcttagattatattagactgaatttaattatactatatagtcaattagaaaatatatatataaaggaggagctaacatgacgtcacatgtaacatttcaacaaggggtccaagaatgtattccaacactactaggatacatcggtatagggctatcatttggcatcgtggcagcttctcaagattttagtgttctagaaattcttctgttatgtttactggtttatgcaggcgcagcacaatttattatttgtgctttagtcattactggtacacctatatcagcaatcgtgttaacaacgttaattgtgaattcccgcttctttttattgtctatgacattatcacctaattataaagattacggtatatggaatcgtttagctttgtcttctattcttactgacgagacatttggcgttgctataacaccacacttaaaaggggaaacaattaatgaccgatggttacatggattaaatattactgcttattcattttgggcaatagcttgtgtgttaggagcagtctttgggaaatacatctctcatcctgaaatgttagggttagactttgcgattacagccatgtttattttcttggctatggctcaatttgaaacgattacacgttccaaagtaagtatatatatcgtattaattgcgttcgttattgtaatgatgttcattttaagttggttgatgccctcttatgtggccattcttgttacatcaatttgtgctgcaacacttggggtggtgatggatcgatgacgataactggacatatgcttttactcatcgttttatgtggattagtgacattaattgtgcgggttgtaccatttttaatgatttcacgtattcaactgtcagaaacagtcatcaaatggctgtcgtttattccaatttcattattcactgcgttagttattgatagttttatcgttcaacataaaggcatgcagggctttgaattaaatattccgttcattgtagcaaccattcctacagtcattatcgcagttgtgacgcgtagtctaaccatcactattattgtgggtattgtattcattgcaggtatacgatggttcttttaatccatttatttactgcgcattgaagttaaccagacaattgtattaaaataaatttaaattaaaccattcaatcaatatatagatactcttattttgagaagtagagggaattggccctatgaagcttcagcaaccgacaaatcatttgtacggtgctacaaccaacgagatactcgaatgataagtactaaagtattatcgcttcatacttttaaaattaagagtggaagcgatttttttattctaaggaggcatagcatgacaaattatacagtagatacattacatttaggtgcttttacaacggaatcaggtgaaacgattgagaatctaaaattacgttatgagcacgtaggttattcgggacaaccgcttgttgtggtttgtcatgctctgactgggaatcatttaacttatggtacagatgaacatcctggatggtggcgcgaaatcatcgatggtggttatatgccgatatatgattatcagtttcttacttttaatgttattggaagtccttttggttcaagttcccctttaaacgatgctcattttcctaaaaccataacattaagagatatcgttaaggcaattgaattgggaatcaaggcccttggatttactaaaattgatattttaattggtggcagtttaggtggcatgcaagtaatggaattattatataatcatcaattcgaagtagataaagcagtcatcttagcagctacggataaaacctcttcatacagtcgtgccttcaatgaaattgcacgtgaagcgattcatattggaggtaaagaaggacttagtattgcaagacaacttggattcttaacatatcgttcttcaaaaagttatgacgcgcgtttcacaccagatgaagtagtcaattatcaacgttatcaaggtaataagtttaaagaatcctacgatttatcgtgttatttaacgatgttgaatgtcttagatagtcatcatcttgatcgtcagcgcgatgatgtggatgaggtcttccaatctttaaatacaaaagtactaactatgggctttacagatgatttgttatatccagatgatcaagtcagagcagtaggagaacgttttaaatatcatcgtcacttttttgttccagacaacgtaggccatgatggttttttacttaattttaatgactgggcgcctaacttgtatcattttttaaaagtttcgaaattcaaacgaaaataatagataagagaacagttaacacatttgtttaatttgaatatagaaggtaaaatagaccttatagtcaaaaaagtataggagtggcgaatgtgttttcaaaagtacatcctaaagcaatgattataggaactatcgtgcttgtagcagttgctttagttacgtatgtattgccaataattggtctgattctatgtttattcgctaccattccagggattatcatgtggcataaatcaattgctacatttggaattggagctttactcactgtagtcatcacgaccttattagggaatacctttgtattaagtgccatgattctagttttattactaagttttgtaattggccaattattaaaagaacgtacatctaaagaacgcatcttatatatcacaacaatgtatataagtattgtgacgttaattgcatttatgttattacaagcgttcaaaaagattccaaataccgaagtattgattaaaccagcaaaagacgcaatgaacaatgcgattgtaaattcaggcgttgaatcagattataagatcatcttagaagaaggatttcgtcaaatggctgttcaacttccaagttacatcattattattgtttttcttttagttttaatgaatatcatcattacatttccaattttacgcaaattcaaagtagcaacacctatgtttagacctttatttgcttggcagatgaatcgcacattattatggatttacatgattgtgctagtatgtgtgatgtttgcgatgaaaccaagtatattccaaagtatcgtattgaatttcgaagttgtgttatcattattaatgtatatccaaggattgagtttgattcatttctttggaaaggccaaacgattacctgatgcggtatccatattattaatggtcgtggggacagttatttcaccctttacgcatatcgtatcattacttggcgtacttgatttaggaattaacttaaaacgaatgattaaaaaatgactttaaaaagtgaatagaggtggaagaatgaaccgtcaatccactaaaaaagcattgcttattccttacattttgatggtgcttacggcaattgcaattgttattgtagggtttatatttaaacctttaatggcaacgtttacggcgattgctttaatgattatgattgtcattagtgctgtattgattaaacaagcattatcaaaaatggatcattatgtggataatctgagtggtcatatttcagcaggaagtaataaagcaattaaacgcatgccaattggtttagttgtgattgatgctgacgatcacatcgaatggatcaaccaatatatgtctgaacatctagaaacgaatgtcatctcagaaccagtcaatgaagtttttccgaatattcttaagcaacttgaaagagtacaagaaatagaaatcgaacatggtcagtaccattatcatgtacgttattctgaagaagagcattgtttatatttcttcgatattacagaagaggtacatacaaatgaattatatgaagaatcaaagcctattattgcaacgttgtttttagataactacgatgaaattacacaaaatatgaatgacacacaacgttctgaaatcaactcaatggtgacacgtattattagtcgatgggcaactgaatataacatttattttaaacgttatagttcagatcaattcgtagcttatttaaaccaaaaaatcttagcagaaatagaagattctaattttgatattctaagtcagttacgtgaaaaaagtgtaggctatcgtgcacaattgacattaagtattggtgttggtgaaggtaccgaagatttaattgaacttggtgaattatctcaatcaggacttgatttagccttaggtcgtggaggagaccaagttgcaattaaaaacatgaatggtaatgtccgtttttacggaggtaagactgacccgatggaaaaacgaacacgtgttagagcacgtgttatctctcacgcattgaaagatatcttaactgaaggcgacaaagtgattattatgggacataaacgtcccgacttagatgcggttggcgcagctattggagtatctcgatttgcgtcaatgaataatttagaagcatatgtggtacttaatgaagaagatatcgatccaacattaagtcgtgtgatggaagaaattgataaaaaacctgaattgaaagaacgatttgtgacatctgatgaggcttgggatatgatgacgtcaaaaacaacggttgttgtggtagacacacataaacctgaaatggtattagatgaaaatattctaaataaagcgaatcgtaaagtagtcattgatcatcatagacgtggagaaagctttatttcaaatccattactcgtttatatggaaccttatgcaagttcaactgcagaacttgtcacagagttattagaatatcagccaacagaacaacggttatcacgtttagaatctacaattatgtatgcaggtattattgttgatacacgtaattttacattacgaacagggtcaagaacgtttgatgcggcaagttatttacgtgcgcatggtgcggatacaattttaacgcaacaattccttaaagatgatgttgatacgtatattaatcgttctgaattgatacgcacagtggaagttcaagataatggtgtcgcaattgctcacggttctaatgataaaatctatcatcctgtaacagttgcacaagctgcggatgaattgttaagtttagaaggcattgaagcttcttacgttgtagcgaaacgtgaagataatcttattggtatttcagcacgttcattaggcggtattaatgttcaattaacaatggaagctttaggtggcggaggtcacttaacaaatgctgcaacgcaaataaaaggtgtcactatagaagaagcaatcgagcaattacaacaagcaattactgaacaaatgagtaggagtgaagatacatgaaagtaatatttacacaagatgttaaaggtaaaggtaaaaaaggtgaagttaaagacgtgccagtaggttacgcaaataactttttattaaaaaataaatatgctgttgaagcaacaccaggtaatttaaaacaattagaacaacaaaatagacgtgctgaagcggatagacaacaagaaatcgatgatgctaaagcattaaaagcaaaattagaagatatcgaagttgaagtaagtgctaaaactggtgaaggcggtaaattgtttggttctattagtacaaaacaaattgctgacgcattaaaaaatcaacacgatattaaaattgataaacgtaaaatggatttaccacacggtattcacgcgttaggttatactaatgtacctgttaaattagacaaagaagttgaaggtacaattcgtgtacacactgtagaaaaataaaaaatttgggacacacataggtagtccactcttttaaaaacaattcatagaaatagatataatgttgcactagcatgtcgaaaattttaagatggatgggtgtaatgattgatggataatatgtatgatcaaagacaaatgccccataacaatgaagctgaacagtctgtcttaggtgcaattattttagatccagaattaataggttcgactcaggaggtattacttcctgagtcgttttatagaggtgcacaccaacatatcttcagagcaatgatgaatttaaacgaagatgctcatgagattgatgtagttacgttaatggaacaattaacgaaagaaggtacgttaagtgaggctggtggccctcaatatttagctgaattatcgaataatgtaccgacgacacgtaatattgaatactatagaaatatagttgctaatcttgcgcttaaacgtcgattaattcaaacagctgatagcattgcgaatgatgggtataataatgagcttgaattagatgctattttaagtgatgctgaaaaacgtattcttgaactctcagcaaaccgtcaaagtgatggatttaaagatattagagatgtcttaggtcaagtatatgagactgcagaggaacttgatcaaaatagtgggcaaacgccgggtattcctactggatatcgcgatttagaccagatgactgcgggctttaatagaaatgatttaattattttagcagcccgtccttctgtaggtaagactgccttcgcacttaatatcgctcaaaaagtagccactcatgaagataactatacagtaggtattttctcacttgaaatgggtgccgatcaacttgcgacacgtatgatttgtagttcaggaaatgtagattctaaccgtttaagaacagggacaatgacagaagaagactggaatcgatttacgattgcagtaggtaaattatcgagaacaaagatttttattgatgatacaccaggaattcgtattacagatttacgatcaaagtgtcgtcgtcttaaacaagaacatggtcttgatatgattgtcattgactatttacaacttattcaagggagtggctcacgtttttcagataatagacaacaagaagtttctgaaatctcacgtacgttaaaagccatcgcgcgtgaattagaatgtcccgttattgcactgagtcagttatctcgtggcgtagaacaacgtcaagataaacgaccaatgatgagtgatattcgtgaatcaggatcaattgagcaagacgcagatattgttgcgttcttgtatcgtgatgattactataatcgaggcgatggtgaagaagatgacgatagtacgcagttcgaacctcaatccaatgacgataatggtgagattgaaattattattgctaaacaacgtaacggccctacaggcacagtgaagttacactttatgaaacaatataataaatttacagacattgattatgcacatgcagacatgtcataaaaatattttttaccgtacattattattatttttaatataaatgtacggtttttattttatttttgaaaaataaagttaagtgaagtatgtgtattaaatatttgtaaaactgtcttgaaatactggtaaattaacaatgttaaaggttttttaataaaatatacatattgatttgactgatgtgaatactatttttaatgttcgatttttatttgcattatataaaacgtattgatagaatacttagtggttaattgagaaaactttggaggtgctcacatgtcatcaatcgtagtagttgggacacaatggggagacgaaggtaaaggtaaaattacagatttcttagcagaacaagcagatgtgattgcgcgtttttcaggtggtaataacgcaggccataccattcaatttggtggagaaacatacaaattacatttagtaccatcaggtattttttataaagataaattagcagtgattggtaatggtgtggttgtagatcctgttgcattattaaaagaattagacgctttaaatgaacgtggtatttctacagataatctacgtatttcaaaccgtgcgcaagtcatcttaccatatcacttagcacaagatgaatatgaagaacgtcgtcgcggcgataataaaatcggtacaacgaaaaaaggtattggaccagcttacgtagataaagcacagcgtattggtattcgtatggctgatttattagaaaaagacacatttgaaagacgtttaaaagaaaatattgaaattaaaaatgcatatttcaaagggatgtttaatgaaacgtgcccacactttgatgaaatattcgatgaatactatgccgctggtcaacgtttaaaagaattcgttacagatacagctaaaattttagatgacgctttcgtagctgatgaaaaagttttatttgaaggtgcacaaggagttatgttagatatcgaccatggtacatatcctttcgtaacgtcaagtaatcctgtcgcaggtaacgtgacagtaggaactggcgtgggtccaactttcgtatctaaagtgatcggtgtatgtaaatcctatacctctcgtgtaggtgatggtccattccctactgaattattcgatgaagatggtcatcatattagagaagtaggtcgtgaatatgggacgacaacaggacgtcctcgtcgtgtaggttggttcgactcagttgtattacgtcactctcgtcgtgtaagtggtattacagacttatctattaactcaattgacgttttaacaggtttagatacggttaaaatttgtacagcttatgagttagatggtgaaacaatcacagaatatccagcaaacttagaccaattacgtcgttgtaaaccaattttcgaagagttacctggttggacggaagacattacaggttgtcgtacattagaagagttacctgaaaacgcacgtaaatacttagaacgtatttctgaattatgtggcgttcatatttcaatcttctctgtaggccctgaccgtgagcaaacaaacttattagaaaaattatggtaagaaaagcgtataaacatagagcaataacgtgctaaaagcgaaaatcggtttttaattttaagatgagcatatgattgacgagagggttgttttcgaagcccgttaataataaagtatttaatggtatacatttaacgttgttaaagtgactcactttagcaacgttttttatatacatcaaataagataataataaccgtctcatttaaatttggatgtgaataaataatgtaaaagtaaagaaaaaacgtatattgtcatgtaatctcccttcaatataactctttttttctaaaaattaaggaattataaaaaaatattaaaattatgtaaaaaagttcttgtctttaaaataaaagctatgctataatctatcttgtgcttaagaacggctccttggtcaagcggttaagacaccgccctttcacggcggtaacacgggttcgagtcccgtaggagtcaccattttaggtctcgtagtgtagcggttaacacgcctgcctgtcacgcaggagatcgcgggttcgattcccgtcgagaccgtattgcttatccaaaagggtaggcattttttttatgcttttttaatattgcttctttatttttataaatatatagacgttatcatgagtaaagcgatgtgtgtattacaaatagatgacgtcgcaatatatttttaatacttctctctttttttatacatcttttatatattactcttaattttcaacgactatccactatcatcattttgtaacattgtaccgtttcagtcttcctaagacttttgtccaatattcaaggagctcaacttatttgtaatataaaacgagcgtggtaaactttaaattaatgttattctataattttaaatatgaaaatagaattaagtgaatattaatgttaaattatatagtagataaacgtgcgttaagacgtaagatagcgccatataatacagttaatgttttactcaaaatataataaacattaaggtttgaactacaatttgagaaatgaggtttatagatatggctagaaaagttgttgtagttgatgatgaaaagccaattgcggatattttagaatttaatttaaaaaaagaaggctatgaagtgcattgcgcttatgatggtaatgatgccgtcgatttaatttatgaagaagagccagacatcgtattgttagacattatgttacctggtcgcgatggtatggaagtatgtcgtgaagtacgtaaaaaatacgacatgccaattattatgttaacagcgaaagactcagaaattgataaagtattgggccttgaattaggcgctgatgattatgtgacgaaaccatttagcacacgtgaattaattgcacgtgtgaaagcaaatttaagacgtcactatgctcaacctgcgcaagaatcagaaggtacaacgaatgaaattgcgattaaagatatcgtaatttatcctgaggcttattcaattaaaaaacgtggtgaggatattgaattaacacatcgtgaatttgaattattccactatttgtcaaaacatatgggtcaagttatgacacgtgaacacttactacaaacggtttggggatacgattattttggagacgtgcgtacagtggatgtaaccattcgtcgtttaagagaaaaaattgaagacgatccatctcatccagaatatatagtgacacgtcgaggcgttggatacttcctccaacaacatgattaggggttgcaaacgatgaagtggctgaaacaactccaatcccttcacacaaaactcgttattgtttatgtcttactgattattattggaatgcagattattggtctgtatttcactaatagtttagaaaaagaattaactaataatttcatgaagaatattaaacaatatgcgacacaactcgaagtcaatattgagcgtatttataaagataatccttcaaatgcacaaaaggaagttcaatcgctactgaatgaatacgctaaccgacaagagattgaagaaatccgctttattgataaagatcaaattataatggctacagcgaagttatcatcacatagcttaattaatcaaaaggtgaatgataattctgttcaaaaagcaatctctcttggcgaagcaaatagtcataacgtcttaaaagactatggtaatggtaaagaacggatttggatttacaacttaccagttaagaatggcaatgatgtgatcggtaatatttacatagagtcaaatattaatgatgtatataaccagcttaacaatattaatcaaatctttattattggtacggctatttccttatttatcacggtcatactcggtttctttattgcgcgaacgattacgcgaccgattacagatatgcgtaaccaaacagttgaaatgtcgaaagggaactatacacagcgtgttaagatttatggcaatgacgaaattggtgaacttgcgcttgcgtttaataatctttctaaacgtgtacaagaagcccaagcgaatacagaaagtgaaaaacgtcgactcgattctgtcatcacacatatgagtgatggtatcattgcgacggatcgacgtggtcgtattcgtattgtgaatgatatggcgattaaaatgttaggtatggcgaaagaagacctcattggttattacatgctaaatgttttaaaaatagaaggcgatttttcattagaagaaattcaagagaataatgatagtatcttaattgatatgaacgaagaagaaggtattattgcacgtgtcaactttagcacgattgtacaagatacaggatttgttaatggttatatcgccgtattacacgatgttacagagcaacaacaagtggaacgtgaacgtcgcgaattcgttgccaatgtatcacacgaattacgtacgccactaacctcaatgaacagttatattgaagcacttgaagaaggcgcttggaaagatgaaaatcttgcgccatcgttcctttcagtcacacgtgaagaaacagaacgtatgattcgactggtcaatgacttacttcaattatctaaaatggataatgagacagaacaaattacaaaagaaattgtcgactttaatatgtttattaataaaattattaatcgacatgaaatggcagcgaaagatacaacgtttgtacgtgaaattccaaatgaaacgattttcacagaaatagatccagataagatgacgcaagtatttgataacgtcattacgaatgcgatgaaatattctcgtggagataaacgtgtcgagttccacgtgaaacaaaatgcactttataatcgaatgaccattcgtattaaagataatggcatcggtattccaattaataaagtagataaaatctttgatcgcttctaccgcgtagataaagcacgtacacgtaaaatgggtggtacgggtcttggactggccatttcaaaagaaattgtcgaagcacataatggtcgtatctgggcaaacagtgttgaaggacaaggcacatcgatatttattacgcttccatgtgaagtgatagacgacggtgattgggatgaacagtaaggaacatattaaatcagttatcctttttcttttagtcatgatgagtattgtccttacgtatatgatttggaactttactccagatttaaataatttagacagcgcggatagtaaaaaaaacaatactaaaaccattggtaaagctttagctgcaaagatggacacagtgatttcaccttatcaagttgtgtcagttaaaggggataaagtaaaaggattgacaccatcaagatctcaactcgctcaagttattgatccactcaaagatcatgaagtgagtaaagtagaattgatgcaaaaagggtataatttgcaaactccgatattagaccatgattttgtcgtattggattttacgtatgatatgccattaaccacctatttaggtcaagtacttaataactcagctaaaattcctaaacattttagctttaatcgaattttaatggataaaaattctaagggtgatctagaattatatgcgctgagtaaacatcatcaacaagtcatgaaagtgacgatagacgcgaaggcaacaccatttactaaaaccattcatcatttagaaaaagatatggaaacctattcggaagtgattacgaataagacaacgattgataaatcaacgcatatttttgcgccgaaacatccaaaagacctacactcatatcgtatggtatatgatacgatttcagtcgaaacgatgaactcaattttatttgatgattctgtcattattcgaagcggaaaaagtggttcaaccacatataataataatactggcgtcgcaaactataatgatgacagtaaaaagtaccattataaaaacttatcggaagatgaatcaggttcgaaagatatggatacttccatcccaagtacattcgaatatattaataatcatggtggtttctttaacgatgatttccgtctgttcgatacagataatatgtcaggagaattaacctatcaactattcctcaatggacatcctacatttaatgatcaacagttgaatgaaattaatgtgacttggggagataaaggaatttatgactataaacgtgctcttctacgttcaagcgtgcctttagaaggtgcaacgacatcattagatagtttggaaacggtgcgtgcgacacttgcaaataatcataacattgattttgaaaaagtatcgaatatgatcgttggctataaagaagatgataagccagataaagatgacatcgaagtacaacgcaatagtgtatttattccaacgtggtatgttgagtatgatggtgagtggtatgtatatcaggatgggaggcttgaataaatgaactggaaactaaccaaaacattgtttattttcgtgtttgttctagtcaatatctttctcattctgatttatattaataaggtgactaaatcgcaaattaatgaaactgaaagcgataatgaagtcaacttccagcaagaagagattaaagtatcgacagatgtattaaataaagatgtaagtggtacgaagatgcaaatgattactgctacttctaagaactttaaatcatacgctgaaaataaatcttcattagaaacaagtgattctggtttcacattaagcggtgaggtagataatactgtaaatgtaagtgatcgtaatcttagtgatttaaaagattacattatcaatcatatttataatggtaaggtctatcaacttggcgatatgaattcaaatacagtcacttacgaacaaacatataatggatacccattgcttaataacaataaagcacggcttcgctttaatatagacgatggtaaagcgatcacgtataaacaaacattaatgagtaaaattgaacctgcaaaaggtgacaataatcctaagaagcaagtcattacgccgcgtaaagcaattgaaagcttgtatttcaatcgttacttaaaagctggcgatgaagtattagatgctagactaggatattactcagtagtaagagaaaccaacgttcaattactacaagctaactgggaaatcaaagtgaaacataaaggtaaagaagaaacgaaaaaatattatgttgaagccacttcaatcaatcccaaagtgattgataactagaaaagtgattcattttaaatagagcaaaacagcggtcaaatttacccgttgttttgctcttaaatcgttaatataaacagagaattggaatttctagttacaggttggtatagtataatataaaagtacttttagagcggaaggtttcgaacaaagatacaagttcgaaactatatttttttagaaaaaaagtaaatataaaataattagactgaaggcactctaaataattaaaatttaagataatgagaaaggatgaaccatcttgattcgaatgagcgtattagcaagcggtagtacaggaaacgcgacttatgtagaaagtgagaaaggcagtctattagtagatgtgggtcttacaggtaaaaagatggaaaatttatttagccagattgatagagatatgaagaatctgaatggcatcctagtgacacatgaacatagcgaccatattaaaggacttggtgtcattgcacgtcgatatggtttacccgtgtatgcgaatgaaaaaacgtggaaagcgattgagaaaaaagacgataaaattctaatggatcaaaaatttattttcaatccgtatgaaacgaaatccattgcaggttttgatatagaatcatttaatgtctctcatgatgcgattgatccacaattttacattttccataataactataaaaaatttacgatgattacagatactggctatgtgtcagaccgaatgaaaggtatgattcaaggtagtgatgcatttatgtttgaaagtaaccatgatgtggatatgttgcgcatgtgtcgttatccttggaagacgaaacagcgtattttaagtgatatgggacatgtgtcaaatgaagatgcaggacatgcgatggcggatgtgattacaggtcatacgaaacgtatctatctttcacatttatctcgtgataataatatgaaagatttagcacgaatgagcgttggacaagtactaaatgaacatgatattgatactgaaaaagaagtattattatgtgatacagataaagcacaagcgacaccgatttatacgttataaaattgaaaagaagtatgaagcttaatgaaaatcttaagaaagtatgaggtttttattaagctctttttttttgaaaaattaaagttattatctaacaattggactatacatgaatattcattaaaaggtggataaatagtgcgatttagttagaatctgtgaataaatataaaagacggtcgtgaagttatccccaaattcaaagaaagttatccactattgtgaataatacacacagaaatactcacattatacacagacttatccacaaaaatagtgtatatgtgacatttttgtagataaatctcaaattttccacagaatttatatgcattcctgttataattagagggaattctgttaacaagttgataacttgtggataagtcgaataactattatcaacacggaggactataatgaagattactattttagctgtcggcaaattaaaagaaaaatactggaaacaagcgattgctgaatatgaaaaaagactcggggcatactctaaaattgagatgattgaagtaccggatgaaaaagcacctgaaactatgagcgacaaagatattgaacaagtcaaagcaaaagaaggacaacgattattagccaaaattaaaccacaagccaccgttattacattagaaatacaaggtaaaatgttgtcatcagaaggtttagctaaagaactgcaacaacgcatgactcaaggacaaagcgacttcgtcttcgtcattggaggatcaaacggacttcatcaagacgtcttaaatcgcagcaactacgcactctcatttagcaaaatgaccttcccacatcaaatgatgcgcgtcgtcttaatcgaacaagtatatcgagcatttaagattatgagaggcgaagcgtatcacaaataaaactaaaaaataagttgtatataacttattttgaaattggttaagtatatagtatctccaataaaatgtagttaacttacgataatgctgaactatagctttgtaaactaaaatgtaaataattacaatcaaattgcaacaatatagttcaagaatgctacaatttgaggacagattgatagcattaatccctttaaaatgaagctaggagatgacttacattatgattagtaaacaaataaaggatttacgaaagcaacataattatactcaagaagagctagctgaaaaattaaatacttcaagacaaacaatttctaaatgggaacaaggtatttcagaaccagacttaattatgcttatgcaattgtcacaattattttctgttagtacagactatctcattacaggaagtgacaatattattaaaaaagataataaaagctattatgaaatgaatttttgggcatttatgtctgaaaaatggtgggtaattattattatagtaatcataatttgtggaacaataggacaaattttttcaaactaatgtaagtatctctcaaatattttgggaggttttattatgaaaatcaaaaaattattaaagacattattaattattttattatgttttgtattgtctgttattgtgcaaaatatttcaatgctatggcatattgtgagcatttggagtgttgaatatattttacatgcattaacttatatagtactttcatacttttcagtaaaatggttcattgaaattgttcttaaaagcaatatgaaagattatagaataataccggtgaaatttttcaagtcttgttttcttataggattaattttgatattagtaattgatttaatatatctattatttattcctggtaaattgataatacctcattattcaacaagcgttggatttatggagatgttctttagcgcatttttaattactggtattgctgcgcctatatttgaagagatggtatttcgaggaatactaatgagatactttgaaaaacaatatggaattttatttggaattataataccctcgattttattttctcttgttcatctatttaatggagagttaaagggagaaaatttattattactacttataggtggctcaattgctggaataatgtatgcagtgactgcatggacgtttaatagtatatgggcctctgctatattacatatgctttggaatataaatggtttattaaatatcacaactcaagatgatcattggggagtatatcagtacatattagaaacaaaaaatgtactgattacaggtggggattatggtatggatacatcattactttcaatatgtagttatattgcagttattatagttatgattgttactaaaagacactttaactttttactaaagtaattatagaatagtgtggttaatcctgacgactagtcggatacaatttaaagagtaataaaaagtgtattattaactgatatgcaaaagtatcccactaaagaaataaaaaaaacagatggtagaatatgttagcatttaatatacaaattagtttttaacttacatgaaaactagttcaataaaaaagttaaattaggagcttattatgaatatctatcaaacctatgcatgcttagtcataggaataatcgttaatagtactactactatactaaaaagaaaaaaattaatttcaaatattaaacaactttggaaaagtaaaaagactttagaagaatttatacgttcaaattcgagatttgattattagtttaatcttcgacgtaagaattattctgatacattagtagatgataaaacatggatagacttagatatggatactttgcttcataaaattaattttaactatacagttatcggagaaatgaactccctataatctaattgagaaaatataagaagaaaaaatttaaggttttagagtcccatgtattattccgttctttcttgatagatgtgtaatattttagtggatttaataattagtaaatttttaacaggcataataacttacaattaagaaaagattaaaacttattaataatagagaggttatgtgaataatgaatgatttgttaaaaatttatgaaaaattgaaaaaagatattgaaaacaggtggttaataccatttcattatgtggtttttggattagcattagttgtatattttctggaaattcctatttataaattggtgaataacttagataaagagcttgttgataaggttttatatgctttttcattagtgtatgatcacattgtaatgatatttatattaattataattatcattttgatagtttatttattctttgatgtgtttaatatgaatcgttttgttccatcgcctacaacttatgtagatggtagtgaaagttctataaactatgtaagtgctattaaaagattgataaactttatgatattaattatcacaaagtactggataacttactttattgtaaacttaatatttcataatgataaattactgtatttaaacaatgattcaaaacatttgtataagtgtctcttgtttttaaatatctgtatctttatagtgcatatattaaaatcaatttttataataaaaattatggcagatgattcgctaagacttattaatgaaaatgatttaactgatttttacataacattaaataaaaatgatgaatatcgtatggtaaaacctaaatatagaaaaatagataattttattattattaaaaaaagtgaagatttcactaattcaaatgagtataaagttattaataaaagtaaaaattttgaggaaataatttatcattttgacaatcttacttcaaatcattgatgatttataaattattattctaagtttaactagaaattaaatttacgcgactgaaacaacttgttgttttggtcgtatttatttagccaaaaattagtttttaggaaaggaagacttcggccgctatcaaataagtcttactttaatgatattatttcttatatcgtaaggatagaaagatataatttattaattttaattaaaattaaaattttctaaaattctttggttacatcacttttaaaaaagggaaaaattgtatgataagaatgtgattaattatttataaattcaaaatttaaggagtttaatatggaaattaaatgtaaatatcacattacggataatatttagaagtatattaaaatcaatttagaagaagatttaagcttagtagaaagcaaaataatatattaaaaaatatgtaaatgtttcacaaaagcgaataaagtttaagtaatagtgtaaataatttcttaggaaataagatatataaaacattttttagtgtttattttgttatattataaaaataatagatagagtccaattatttaataagataaattgaagttgagaaatttttaaatatgaatgtaggaaatcaaattagatattatagaaaagaacgtaattatcacagatgaatttagcagaaaaattatttatatcaagtcaaacgatttctaatcgggaataactttactaagtatatttatatttagacttttataagtaataaaactataggctataagtgggaaggtgtatattattatttcaagtgttaaaggttctaatgttaaaaaaattattaataaaaaaattattattaaagatcttacttttaaatttcctaaaaatgaaattatattaattgagggcagtaatggatgtggtaagtctatgatgctcaaaatgatagtaggattaataaggcctacctctggaagtattaaagtaaacggaaaaattagctatgctccggattatttgccttctacaataaatttaacaataagagaatatttagattttctagataatatatacagtaataacgaacataatatagaagatctaattatttatttcaaattaaataatttattagataggagattgaatttatgttccaaagggacaaaacaaaaagtaaatttaattcaatgtttaattaaaaatgcagatatttatatattggatgaaccattttctggtttagataaagaagcaataataagtttgaaaaaattaatcgttcaaaagcaaaaaaatgcaactattatattaacatctcatgaagaattactcgatgaaagttttgttactcataagttcaacttagaaaataaaaaatggatagaattacagcaacgattaaatccctataaagaaataaaagttaacaataaaaattacaataaaattaaagatatgatgaaaagtttcgatagagttaaagtatttcatcataaagaatacactattataaatgttgataatagacagagtaataatgtactaaaagtgttaataaataatggttacttaattgaagaggtgagtaatagaaatgattgaaccaatctattattttttcaaaaatatgattagatcatataaatttattgctccatatagtgtatttatattgatagtagttattttatattattattcagggcaaccagctttatctagttttggtactacttcaatgttattactttttatttctatttggttaaatttgattacttttgatttagaatcagtagaagaattacaattactacttacgcaacttggtagatcattgtatctaacatctaagctgatattcaactttttaatgaccgtaccattaattatttttgccattatatatccattagtatctcttaggtttgaacatttaccatctcttacagagatattaataggaattcatgtccatattataattagtattactgcaataatattaacagcattatttaaatattctaattttttatcaagaaaatacagttggttattattaatattgatatctttgttagctattttaaaatcaaatattattaaagaaattcctacttttaaatatatttcatttattttaccacctataagtgaaatgttgaattatctaaatcaacaagatatttctatttttaatagccaatttttgatagtcaatatatggtactgcgtatatatagtattttttattataattatatacattatatttaatagaaaagatatcatagtattaaataagtagttttttaatagatatatataaatagagtaattaaggagaaagctaaatgagtgaaaaagaaaggacattaaacaagcaaaattctaaaatatcaaattcagttaattcagaaaatgaaggaatagggtttcaatttgtagtgccaattgatgagcaaattattatcaatataaataaaattttaagtgattacaatattaaattaaagcgaacagaatttaatcttacctcaaaatttaacacgagtgagttaggcaggttacaaagtgaggttggaaaatacaataatttcattattcaatatgaaaaattaagtattaataatgaaaaaataaagataaaaataaaaagtaaatagcttaatgaaatgaaaattaagattgaagaagttcttaatattaaagaattaattttattagatttaaagaaaactaatttaaatgatgaagaaaagaatgaactatttaatgaattggaaaagttatttaaaaattataaaacgaagaagaaagctcatcaacttgtatctattatatatacaaagctttatataaacataaatcaaaatgaaagaaccaatgtcggttatttttatttaaataataaaagtgatgacatggaatttaaaaaattacatattcgtgaaaaagttgatttatctgaaaaaattatgacaaatcaaatgaaactactttacaagatatttgatatagacatttcaaaatatcaaccggataattatcatggcaaatcagaaaataatcagtttaattacagttttaattcttcacaatatcaaatattaagtattcttataagattattaaaaaaatatcccttacctactactcctaataatatagattatatcaatgctattaatgaatccatttcaaaaagtaatgcacaagaattcgaagattttttaaaattgggaataaaagaagtaaaggatatagaattcagaaaactaaaaaaaatattagatacagatttttcttttcaaactatgaaacgtttagcggcagaaagtgatattctagaaaaaaagctaattacattttttaatgcagtgaaagaaagtaacttctatgaaaatgttattttatatcaaaaattaagtagtgctatcgagagggtgctatttgagcatcaagatgaaaaagaaaattataataaatttattaagagtttgagaagtaatgatgattcaattatcacttttgataatgacatagcatctaaatatcaatcattgaaagaattaattttgagtggtaaaagtggtgattttaattctttatatgatgaatttattaattattctagtatagctcataaacatgaaataaccgaagaagagactgattcaatgaacacatcaccacacacttctattaatataaaagaagtatttattgataaatataatttcaagataccttttattgatcaaattttactaaagagtcttcaatcagataataaaaaatttttagatgctagaaatctttatctaaaggaataccttgcacactcttctttagaaaaaagtattagtagtactcaatcttttattccagacagagaaattcaagaaggaataaatcatctaaatcaagctatcgatcatcttggtttacaactcttaaaaaaagatatacgtaatcataatcaatatacatcttatacccatccatttcttaaagaacttagaaggatgaaacgagaagtaagtatatttaatagagatagtatcaatagaaaaccacgaataactaatgaaatttataattataaacctaaaaatactaatatattcacagatagattaagcgagctagtaaaagaattaatgtatttaaaaataaaaaaagaattatataatagcagtaaatatactgattaaaaattaagtatgagacaaatcttattacaagatttgtctttttttgttaaataattaaatttatctaatcgctcccccctaattatgacttttggatatgctcctgattaatacaaaaatatggattatgataattgtgcaacgttgcttatatcaattcccgggaattgaattaaattaattttgatataggagagttgcccaatgtttaaagaagttagattaaatcaccagtacggtgtaagtaaaaatgaacataaatttgaaggacagatcgttttgccagatggatttagttctaatattgtattccagttaagtgatcgtgctaattcgcttatcactttaatgataggtacagcgcttatgctaccaagtggatcatctttttcttgcaatagcatactagatgaaattggtggcgatgtttattcagatatctacgacgatgaaatttttgtaattaattatctttttgatttgtattttgaatggcgatgttctttgtatgagctaggtgaggaggacgccgttaaatacaagatatttaaaagataaaaacaacatgtctcaatgcttaataatagcattgagaccatcttattaaaattaaattattaaatagataaaagaaggagaatatatcatgatgatgaataatagtaaaagtaaggattcagaaaattttagaatgaaaatagtgtttttaccagaaagtactaaaacgcaagagtggttgattaaacttaaatcagatcaattagaatgcttgaaattaaaggagcagttcattcgttcttcagaagaaaagtgtaacaatcttgatccagaggataaaactgagttagacaaatatgttcatattcatcgggaactagttcctctaaaacaagatatagaagttaatggatttaaaataaatactcaaatgctgtctaaagtaaaaacccaaattttaaataaagctaaaagtgttagtcatcgggaaaaattagataaaaacttcaatgtactagaatcagccattgatggtaaccaaaagttggatactaacatttctttaattgggactcgcacccatcgtataacgactagaaattttaatgttcaaggattacctaaagaagtgaagcaatttatattatcaaagcaatttaataaagtatttatgattgatttcaaggcgtttgagccatctgttgtagcttatttggcggatgatgatcatttgaaagagtatctcaatggtagtcagggcttatatgacacattactcaataacttatctcttccaaaaactcatcgtaagcttgtgaagcgtgcatttataggttcattcttgtttggtggaaattacatgagtaacaaatttaaattgaatcaatatatatcagaagttgaatggaataaagcaatgagcaagtttagcaatgtaataaagctaaaagaacaaattgataataaaaagataatgaagatgccttatggtattactcacgatatgaagcattaccatggaagcagtattatggggctatatattcaaacagcttctagttatatctttaagaatatcttatgggaaatatatcagcatcagtgtgatcaagaagatttcagaattatgctcccaattcacgatgccattatgattgagtacaatacagaagaagttgctgatcgtgttagacagttaatggaaacaagtgctaatcacttgtttggaggtaactttgctcataccacaattgaataaatgggaggaaatcatgatgataaataatagaggacaaaatttatcaataccatcatcatcagcgctagttaaagataatatttacgttgcaaaactgcattctgttggactatcagattttgaagataataagcatgtatttacttatgaagtagttctacatggccaaatatataaaattcgaagaagtattgctttaaaccctagtgataatcaaatttctatttttgagtggctggaacgccatagtaattatagtcctagtcacactaaatatggttcctatatagatcatgaacacttaatacttgttgatgaatacgaaggtcgttattttgtacgtgatgtagcaccattagaaaatatgatggaggataaagtaaatgaataatacgatgaaattagcaaaacaattattaagtgaaaataaggaggcaatcgaccgtaatggtctgattgcacttcttgaatcacaaaatacaagcgataatgaggaagatttaccccaagctaaagcaatatataacttattgattgaagaattgaactttgaaataagcactgatattaattatcgttcaaatatttacggttattacggtataaaaaataaacctaaagatactgaccttgttcaaatggctacacaaattttgaatgttaaacgttttgagtcaaaattatttatgttttcaaaagaaggatggcaaaagctagatgatagtgaattaagaagtatagttaggaaaactatgcaggttatattaattgattatacgcctacccaaagtgaattgaagagtgtcatagatggcatgaaagaatccgcagatatagatgaattggtagaagatgaacgatatataggttgtcatcgctatttattcgatttagaacagtttcaagtcattgataactcaatcgatatctttccgaaaacacgattagatgtagaactagataaaagtgatagtattacttcatttataccgtctcattttgataaatatatatcagaattagctaattttgatgctaatttacaacaatttttaattcgtcatacggctgtattacttacatcaaatcgtaaattacgacgaggattaattttttatggtgaagcaaataatggcaaatctgtatatatcaagttaatgagatcattcttctatcggcaagatgttgtttctaagacgttaaacgaactgggtggaaaatttgataaagaaagtttaattggtaagcgattgatggcaagtgatgaaattgggcaatcaaaaattgacgaaaaaaccgttaatgatttcaaaaaattattatcagtagaacccatacatgttgatcgtaaagggcgtacacaagtagaagtcacattagatttaaaacttttgtttaatacgaatgctgtcctaaattttcctccagaacatgcgaaagctttggagcgaagaattactattataccttgtgattattatgtcgaaaaagctgatattgatttaaatgacaaattaaaaaatgagaagaaagatatctttttatatttaatgtacgtatataaacaaatgatgattgatgatattgacagaattgaaaatgaaaaagtaacggaattgactcatgattggcttaatttcggttatgtattcatggataagtctaatacatcaagagataatcaaaaagaatgtattaaattacttagaaatacgatagttaaaaaagaaagtagccgacttaaagtatctgatttaaataatcaaataaagagaaagttgagtttaagtagccaaaatattaagcaactcgtgaagttaaattttgatactgataccgtgcttaaaaatggatatgaatattggattgacttagattggaaaacgatcaaagaagaaaacggtattatcccgataagcccgaatgataaagaaattaatgaaattgataatgaagatatacaagatgattgggtttcagaggaggatgacgagctatgaatcaagaacaacttgatgcttttgtagaagttttattgcctatgatagaagaaagattgaagtcataaaatgagtgaggacactttgaatgataggttcatcttcgaacctatctctttctcaaagtggtaaaagtgataaaaatgaaacgaaattataaatatatattatctatatgatgttacaagatcagtagtctgtagcaataatttaataaaaggagagcggtatgatatgaagggtaaaattgcactttattcacgtgttagtacgtcagagcagtcggagcatgggtactcaatccatgaacaagaacaagtgcttatcaaagaggttgtgaaaaactatccaggttatgactatgaaacttatatcgattctggtatatcaggtaaaaatattgaaggtcgaccagcaatgaaacgtctattacaagatgttaaggataataaaatcgaaatggtattaagttggaaattgaatcgtgtctcacgatcaatgagagacgtgtttaatattattcatgaattcaaagaacatggcgtagggtataaatcgatttctgagaatattgatacatccaatgcttctggagaagtactcgttacaatgtttgggttaataggatctatagaacgccagactttgatttcgaatgtaaaattttcaatgaattctaaggcacggagtggagaggctatcacaggcaggttgcttggatataggttatcacttaacccacttacacaaaaaaatgatttggttatcgatgaaaatgaagctaatattgtacgggaaatctttgatttatatttgaatcacaataaaggacttaaagcaatcacgacaattctaaatcaaaaaggatatcgcaccattaatcaaaaaccattttcagtgttcggagtgaaatatattttgaataatccagtctataaaggttttgttagatttaataaccatcaaaactgggcagttcagcgaagaggtggtaaaagtgatgaaaatgatgtgatattggtcaaaggtaaacatgaagccattataagtgaagatgtatttgatcaagttcatgagaaactagcttctaaaagttttaaaccgggtcgacctattggtggagatttctacttacgtggccttattaaatgcccagaatgcggaaataatatggtatgtcgacggacttattataaaacgaaaaagtcaaaagaacgaacaatcaaacgctattacatttgttcattatttaaccgttctgggagttctgcttgtcatagtaattctatcaatgctgaagtcgtcgagcgtgtaattaatgttcatttgaatcgtattctgtctcaaccagatattatcaagcagattgcgtcaaatgtgatcgaagaactgaaacaaaagcatagtaaccaaacagaaattaaatatgacattgatagtttagaaaaacaaaaagctaagcttaaaacacaacaagaacgattattagatttatatttggatgaggaaatagatagtgaaatattgaaagataaacaaagtcaaatgaatcaacagttagaagtattagatcaacaaattaaagaagcgcaacaagcaaatcaatcacaggatgaaatacccaattttgataaattaaaaggacgactcattttgatgataacacgattcaacgtgtacttgagaaaggctacacccgaagctaaaaatcaacttatgaaaatgttaattgattcaattgaaattacgacagataaacaagtaaaacttgtaaggtataaaattgatgaaagtcttatccctcaatctttgaaaaaagattgggggtctttttttatacctaaatttaactttgtgataaatgtcacaaatgaaaataggattgaaaatttatcacttttaccacttttttagagtgacaaaagtggaggaattttgaaatattttatttatggagtacaaattattaattaaggaggtcattataatgacgctaagcaaacaacttaaaacgtatattactgaacgatttaaattaaattatcaagaaacttgggcttgtgaaaccgtagatgcggtggctgaagatgtattacctgaaaaatatattaaaaatagtccacttgaacataaaattttaaatacttttacctattacaatgatgaattacatgaaatcagtatttacccttttttatgttatctagataaggaattagtagcaataggttatttagataattttgatttagactttatatttttaaatgacactcatcaaattattattgatgaacgctacttgttacaaaaagggggcgagtaattatgaactggatcaaggtcgctcaactatctgtcacagttatcaatgaagtcattgagatcatgaaagaaaaacagaatagaggaaaatagtatgaacatcaatcgatacatcacaagaggaattaataaaagtattccactagaccttcaaaccttactttggcacatggtagaagaaaaagataaccagcctcataccgattacctacacattttcaaactacaagaagatgataatatgttgtcaattacacatgaacaagagcagcccgcatacaagttagaatatcactatacaaactatgaaaaaaatcaaaatgcattacctaagaaagtctacgtcattcgtgaagatgacgtggacgatttttattatgtgatgctcttacctgaagaatactagaaggagtgacaaatatgaatacaatcaaaagtacgatccacacagaagcgatttttagtgatgatgaacaacaccgatacttactcaagaaaacttgggatgaaaagaaacctgtttgtacagtgataaccatgtatcctcatttagatggcgtattatcactcgatcttactactgttcttatactcaaccaattagctaattctgaacaatatggcgctgtatatcttgtaaatctattttcaaatattagaacacccgaaaatctcaaacatatcaaaaatccatacgatgagcacactgatattcacttgatgaaagcgataagtgaaagtgacacagtgattttagcttatggagcttatgcgaagcggcctgttgtcgttgaacgtgttgaacaagtgatggaaatgttgaagcctcataaaaagaaagtcaaaaagctcattaatccggtaacgagtgaaatcatgcatccacttaaccctaaagcacgtcaaaaatggacattgaaataaaggaggattatctatgaaccatgaaactacacaatcagactggcgaacagtggctagttgcttagcatctcaaaattatatatctatcataaaaggactagtacatcattttacagcgattgaagatgaagaaatacttgataaaatctatgaagattttatgaatgatgactctatagcaacggtacttaataatgatttgcaaacaattattaaccaatatctatcaaaataaaaacctatattctaataaaactagaacatccttcacttttgcagtgaaagatgttcttatacctatttttttactaatttcaccttttatatatttaattttctaaaaatattagatttttaattaatataataaaattattttatatactcagtaacatcataaagtttataagatgttactgagtatcttattgttgtaaattggagacatttttgaggttacaaaacaattgaatttatttaattctcaacaatacgaaatattataaataaaaaatcagtaaatgaatttatattaaactcatttactgacaattcatatcctaaactgttttattaataggattattgtaaatctgatttttcggagttattgttgttattgttgtttttatttttttgagcccattcttttctagtcattacatcgtcaacttgcatgttaacttcaacaacctctataccagtcatatatttaacttgttctttaactaagtcagttactttacggaagatttttggagctgattcaccgtattctaagatgacttttaagtctacagcagcttgtttttcaccaacttcaacagaaacaccttgtgttacgttattaccacttgagaaagcgttagaaatactatcagtgaaaccgcctttcatctctaagatacctcttacttcacgagcagcgataccagcaattttttcgataacttcatcagagaaagttaatttattttcaaaatgttgttggttattttgacgttcttctctgtattgttgtgcttgttcttgacgttcttctctttctttttcatttactccagtttggttattatatgcttgcttagctttattattatcttcagccattataattctccttaataaagattttgtttttaataattaatttttattcatctgaatccttttacaatgacgtttaactccatcgatttaaaaagtccatgaaatcttgtttacagtcttttgtatacccaataccaactcctattaaacataaaacaataattaaagttgttttccagaaccctaaagtcagaaataggattgctataattaagaatacaaagaaacctataatccgccatgtatataattttaggaagtcgataatttgttgagtaaaatcttgactatcttgattattatcagtcacgttatccctcccttatagtacgtgttgtccagcagatttttgatctctaatattaatttctaattttctaacaggcatttcagtaaaatgctcaacattatgtttaatgtcagatctaatgctctcagttaatgattttacttgcacatcattaggcactaagaaatcagctttaatgtcaatgtaagaattgtttttcttattgtaaagtttagtaaccacgtttggttgtctgatttcatcgtatttagttaatgtatcgtatgcagatttttcgactgctttacgtgatacataaatatgtccatcattataatctttataaagacctggttttctatatgttggtttaaagatgctaaataccaatataataccaattaacacgagtaaagctgataaaccgattaataatggttggaaccaattgaattgcaagaaataatcttgataacgtttaatacgactatcatctatgtacataaacagtaagaaaccaacaatcacaactactaataggccaaggataaagtttttaaatctatgcacctctaaacacacctccttagttattattaaattatagaattaaaagaatcttaaaatttttatttaatttttaaatatattaaaattcactttctaaattttaatgttcccaaatttaataccatagaaacctattttttataattattttcttttttgaaatcgttttattttgtgatgtaaattatctttgtttattaaaatatttctctttaatatccgaagatatttaaaatatataactatatttgtttacttgaataaaatacatgcttattgaaactatagaatatttgatgctatctatatcatttaaaagcattcgaaataaaagagaaatgtgaagaaataattcgtcacgcattacctaagaaagtctacgttattcgtgaagatgatgtagacgttttttattatgtgatgcttttaccagaagaatactaaaaggagtgacgataatgagtacaatcaaaagtgcgatacacacagaagctatatttagcgacgatgaacaacaccgctatttactaaaaaagacatgggataacaagaaacccgcatgtacagtcataacgatgtatcctcatttagatggcgtattatcactcgatcttactactgttctcattcttaaccaattagcgaattctgaacagtatgatgctgtatatcttgtaaatctattctcgaatattaaaaccccagagaatctcaaacatatcaaagagccttatgataaacacacagacatccacttgatgaaagcgataagtgagagtgacacagtaattcttgcttatggtgcttatgcgaagcgaccagttgttatcgaccgtgtcgaacaagtgatggaaatgttaaaacctcataaaaagaaagtaaaaaggcttatcaatccagcaacgaatgacattatgcatccgcttaatcctaaagcacgtcaaaaatggacattgaaataaaggaggattatctatgaaccatgaaattaaacaatcagattggcgaacggttgctaattgtttagcatcacaaaattatatatcgatcgtaaaaggattagtacatcatttcacaacgattgacgatgaagaaatactggataaaatctatgatgattttatgaatgatgactctataacaacggtacttaataatgattttcaaaatattattaatcgctatttaatttttttgctattttccattatatatatttaattttatttaaaatgtattgtacaatttaaaatgatggagggatatttactttatgaaaaaatatataattagtttagtacttttaacttcttttttactatccgcttgtacaattaatattgagcgcgatggggaaaatagtgagaaaaataaacagaaagaaaatactcatactgattcaaataatacaagttcgaatgaatcagatacttctaaacaatcatctaaagaaaatactataaatcaaacagaacaaaatcaaccagctgataataattcaagttcacaacaagacctacaattaatcacagaaaatgaagctattcaaaaagtaaaagatgagtttccacctatacgcacaggaaatgactatcgtatagatactactagagctgataataatgtttatgctatcaaatttacttctcaagatgcagagggttatcctatgaaagctgctgtcactattgataagcgaacaggagaatttattgattatattgatgatagaagcgatgaagataaagagcgtcatgtccaacatgctaaagaaagtactctttataaaggtccatacgatgctttcagaaaagattttagtcataaaataaatgaatgaagtatatatgaattatcatccttaatataagagcatccttcactttgcaatgagggatgctcttttaatttattttttattgattactcgccataagttctgcttgctcgacaacttgttcgacagccatcttttgtaaatcagggggataaccatatttcttaagcaatcgtctaacagctacgcgcattttagctttggcgctatcacgtttagaccaatcaacgcccatgttttctttcactgttttagttagctcatgagcaatcgcacgtagttctttatcttccatcgctttttttgctgtttcatgtgaaactaaagcatcgtaaaacgcaatctcatccgaatttagacctaattcatttcctcgttgttgctcttgtttaatatctttagcaagttgaatgagttcttcaatcacttttgatgtttcaatggaacggctattatatttattaatcgaatttcctaacatttcagagaaacgcttagataccgtcgcattcattttcattaatgatttgacttgtcctttgagtaatcgatttaataattctaccgccacgtttttctgtttcaatccttcgacatcttttaaaaagtcatcagataggattgataagtcgggttgttcaagacctagcgtttgataaacatcaatcacatcttctgtcacaacagattgtgacaccaattgattaatcccagcttcaacttctgcagatgttttacgtatttttccttcttttgatggttgtaataatttaacaagtcctgctttaactgctttaaagaaggcaatttcatcattgagttcttgggctgtaggttcagtcgcacaaagagcaaaggctttacctaactctgtgaccgttttaataaaacgttggcgttcatcttcgcctaaaccaatcacataatccatcgtatctgaaatagtataataacgttcagattttttctctgaattaaatttagaataatcaagattatataacatatcttgaattacatcatacttcaataacatcaattcaaccgctttatctgtatctattgccgtttgagcttgatcagattctgtatattctttaagtgcctctttcaaactttcggcaatacccacataatcgacaatcaatccacccggtttatctttaaatactcgattaactcgggcaattgcttgcattaaattatgacctttcatcggtttatcaatatacatcgtatgcatggaaggaacatcaaatcctgtcagccacatatctcgaacaatcacgagttgtaattcatcattcacatctttcatacgtttttctaatacattacgacgttttttaggaccaatatgtctttggaaagaagcaggatcactagatgagcctgtcattaccactttaataacacctttatcatcatcatccgaatgccattctggttttagacgaatgatttcatcatataattcaacagcaattcgacgactcatcgttacgatcattcctttacctttcatcgcttgctgacgtgtttcaaaatgttggatgatgtctttggctaaagcttctacacgaggttttgcgcctgctaaggcctcaatacgggaccattttgattttaaacgctgttttacatcctcttcttgatcttctgtaatgtcattatatgcttcgtctaagcctaaattttgaggtgaatttaatggaattacgcgactttcatagtaaattttaactgtacttccatcagctacggcttgtgtcatatcataaacatcgatatagttcccaaagaccatttgcgtatttttatccgttgaagctacgggcgtgcccgtaaatcctacaaacgtcgcattcggtaaagcatctcttaaatacttcgcataaccatatttaatgccttcccctttatcatcgtattttgcattaaaaccatattgtgtacgatgcgcttcatctgccataacaatcacatttttacgttctgttagggcagccatggtcgtttcattttgttcaggttcaaatttttgcatagttgtaaatacaataccgcccgactcaacagataataacgattttaattctttacgtgttttagcttgttttggcgtttgtcttaataaacctttaccagaccgtccttttgatttaacaaacgtactgtacagttggttatctaaatcattacgatccgtcacgatgactaaagtagggttattcagcatttgaattaattttccagagaaaaagaccatggttaaacttttacccgacccttgggtatgccaaataacgccgcctttaccatcaccttgcccagatgaagctaataaagctctgtcaacggctttattaacggcataatattgatgatacgctgctagaattttactgatatgtcctttgccatcatcttgaaataaaacaaaatatcgaattaaatcaagtagtgtttcaggatttaacatcccatgaatcagcacatctaaactagctaaacttgaggatgattccgtttctccatctttggaacgccaagtcataaaacgatcatagttcgcagttagtgaaccagcttttgtattaataccatcacttgtaataagcacttcgttaaatgtaaataattgtggaacacgcattttataagtttctaattgatgataaccatcttcgacgcccacagtttcattggttgaatttttaagttcaatcacaacgataggcaagccattgataaagagtacaatatcgggacgttttgtatagtctccattaacaacagtcaattgattaacagctaaaaaatcattgttttgtggatgttcaaaatcaacgattttaacaatttctacaatcgattgtccttcatcatcatagtcttcgatttcaacaccattgatcaaattttcatgaaaagtaaggttattttctaaaaggttgggcgacttctctaatgttaactcatgtatcgctttttggataaaacgaggatgaatctttgagttgattttttttaatgccttttctaatcgttcatgaaggacaacatctttatcacttttacgttctggtgctagacccgtcatactaagctcattaccttttttgtagtcatagcctagcgattgtagccattctagtgcaacttgttctaaatcatcttcattaaattgaaagttcatcgctgttcacctcaatatcatcaggtatttctatttcaccagacataagtttaggaagaagcgtatctcgtaattcaattagctttttattttctttattaagtattctaattttttgaaaatatgattttatagaattttcgaatttaataatagtttctttatctgctattacaaatttaatgctatttagattttttttattaagctttggttgtacagctccagttatataaggagctacattagtgttctttaaataaagcattaataattcatctgaaataagctttccttttaaaatatgtgcatgattacttacccaaaatttaccccacacgtattgaataaaaggattatctgtttctgtttgaacagttccatcttctccaactaatatatattttccatcaaaaatataattatctacataatctatgatttttgttgctccataatatgggtgtattgattctcttttttctctttcaagttttgataatggctttctaatagaattaaagctttctgctgtttcttttacagttttgatagaccaatttttaggtatctctcctaattcactatcaatcatttctcctccactagatttataaggggcgctatttctatctgggaattcaaaatctataaaccaacgtttaaacaatgtttgtgatagttcctctaggtttgctattatttttttatttaaattaattttatcatctattttttttaaaatatttgctataaaattttgtatacttctacttggtaaatcaatacttaattcacctaaaactgatggttttattgaaggatatgcagaagtactattttctgcaatattttgtagataatttgttactttctctaatgttaaatatttatataagtaataagggttaactaagttttgattaggagttattactgcaaagcctgtagaaactatataattagattgcttatttgtaataaaaccaaaatgtttttgattaggcctaacagttgaaattaatatatcatttttttgtacaattcgtttcgccctactaggaattttgtcggatatcctatttaattttataatatctttaaattctccattaactaaattttttgtgtctaaatattcaataatattaggatgattatctttttttatggaatttttattaattttgcatagttttttaattttagattccataacctaacccctccagtgatttacggatttggtcttcaagttcttttgattttgcgaattgttcacttaattcagaagtaatacgttccatttgttgttcaaaaagttcttcatcttcttcaacgtcagctaaaccaacatatcgtccaggtgttaaaatgtattcattattcttaacttcttctaaattagctactttacaaaaaccagctatatcttcatatgatttatcgtttgtacctctccaagcatgatacgtttgtgttactttctgaatatcttcatctgaaaattcttttaatgttctagataccatatgaccgatttcacgagcatcaataaataaaatttcatttttacgttcttttttatcattttgacctttattattattaatgaaccaaagacagacaggtatttgtgttgaataaaagagttgacctggtaaggtaacaatacattccactaaatcatgttcaattagatttttacgaatttctaattcatcttttccacttgtagacatcgatccattggctaatacgaatcctgctgtaccattaggtgctaatttggaaaccatatgttcaatccatgcatagttagcattaccttttggcggaataccaaattgccaacgataatcatcaagtaatcgttcttgaccccaatcacttgcgttaaaaggtggattggctaatatgtagtctgcttttaatcctttatgtaaatcattatggaatgtatccgcatttcgttcacctaagtcattatcaattccacgaatcgctaagttcatttttgctaatttccaagtggtaggattagactcttgaccataaattgcaatatcatctaagcgaccttgatgtttttcaacgaagcgttcactttgtacaaacatcccgcctgaaccacaacatggatcgtaaatgcgtcctttataaggttcaatcatctcaactaataattttacaattgacgagggcgtatagaattctccggcatttttaccttcggcacttgcaaatttagcaataaaatattcatagactcgacctaatacatcttgtttacgactttctatgtcgccaactttaaatgtaaataagtcaataatatcccctaatttttctttatctaacgcaggacgtgcatattctttaggtaatacacctttcagtgattcattttcattttcaatcgcaatcatagctttatcaataatttgtccaatttcaggtttcttagcattatcattgatatattgccatcttgcttcttttggaacccaaaaaatgttttctgctaaatattcatcttgatcctcttcatcagcataaggatcttgcttcaattcttcatacttttcttcaaaagaatctgatacatattttaaaaatattagacctaatgctacatttttatactcagcagcatccatacttcctctcaatttatcggcagcctgccataatttttcttcgaaacctataattgccattaataacacctcttaaatatttttaatttaaatatatcaaaatttaaatattatatgcttgtatttttaaatataataacattaatctaagtgttatttttttttgtttaaagtaatatatatttcttggaacttagacgttgttttttgaaaatttggttcatctagttcttttaattttctaataatcaaaagatttaatgcatacttattaatgtgatatttagagtctttttttataatatttttcttctcaattgcattttcgaaagacttgaaattctggtaactttccaaatcttcttttaaggtatctgaaatttcatcttcaattagcaattcagagatacactcagtaataaattctttctcaaataaatcttcaagttgtattgagtattcatcttcgattttttcatccaaatttgactctttgatagatttattattatttaaaattatcctgttattataattactattaaaattattttgaattttttttgccatttccattccttttttatcatagtctagaactcctagtggtggattaggaaatacctctttatacacagtaataaaatctgaaattttattagctccttctgtttcaatgaatgttaagctctttttaggaaataacctgtggtagatgtattgatgaacaattttatcggttttaccttctaccataactacagtcgaattaatgtttattcttaaagtatctaataaatttatacccatgatttgatttatttccaatagtttgactttatcttttttattgtaatcgatatatgttccttgtaaaacatctctttcgattagaagaatgttatttatatcagtttcatttataaaagctgtcgagtgggtactgataattatttgtgaatttttaaatacttcttgaatctttttatataaatatctttgggcttctatatgtaaatgaacttctggctcgtcaaagagaataatatctggcattttattattttttacattgtatttattaatataatacgacattattattaatttttttactccattacttttttcattaattggtgctgtatcgccatagcaatctgcaacatataattcattattaaaaattaacagagaatagtagtccttacttatagctaataagtctctatttatattagataataaaattgcaacttcattattatctaagtcatcaaaaaattgaactatctctattattgattgatcaagagaagtattattatctactttagctattttaattcgtttatttacagcttcttttgcgctttcgttatatattgtattagtattattatcttcatattcaatagaatgtttatttttattattaagagtaataatttgtttattacttgttgagagtatggttttaggtaattttctttcaaaattttctaatctacttatactttggaaagctgtatctaaatttttaacatctaatgattcaaatattgcactaattatatttgatttacctgaattatttgatcctactataatattcaaatttctatttaggtttagttccaaatgttttatagatttataattataaatttctattgtttttagcgaattcatatattttttatgactccatttctttcataattaattatagctaaataaaattttgtatattatttagtataacagaacgtgaataaatctaattgaacagtaataagcaattttttaaattcattttttttagtagtggtgttgatattaattgccaataattaaaaataaaaatcaatgttaatttaagttactaaaaatattggtttctttaaagagaaatattaaatgtgcaataagatgtataaatataaaaagagatttattaactcgactaaaccttctactatattcgattcaaatggtaatgaaataggagttgttcaaaagtattataaaaacatattcgaaaaaattataggaaatgtatcttttgggcacttttttgaaagatatctttttaaggatgagaatgacaatatcatagtaatggctaagaaaacaggaatacaacagaaaaaaattatagattaacatattttgaagttaattctggagtatataacgaaatacacttaaacaatgaagaaagatttaataaagaaaaattagggttgttcaagtatgaagatcaacttttttcagtaagtttagataaaaaaattttgtaaaatggtagacactcaggataataaggaagtggctagttggagtcgcaaaggggattacatttacattaaatttaaaggaggttttgttgaaaagcacaaaatatttacgattgctattctccatactttttcaaataataatattcgatattatcgtaaagataaaggtccagtatatttaggaccaccaccattataaataagcaaacatagtaaactagtataacattaaatagcccccacaaatttaagttttggctcaactttgtgggggcttcttaataagatatactcttagtgtttcattttcctttttaccttaatggtaacttatagctcctaatgatttatagatacaatagtatttgaattctttctcaattatttttttaaagttaatatcttcttaaaagtaataaagagttatttgagttttgaaatttttagtcatcttcacttatatttttagtttttttaaagtgtattttaatttcaaatataccatttttatatgtggcataaactagcccatcttgttttgcaactaatttttttactatatataaccctattcctgaatgttgcttatgacgacttaaatcagcgatgtaagaacgattaaaaatatatttaatgttttcttgagttagttgttcatctgtatcgttagctaattttacaattacgtcattgtctttttcgtataaatcaatatcaacaaagcttttactatagcgtagggtgttctgaattaaatttgtaaatattctatttgtcgcaaattgatctaaaacaacttttgaaacttttgacaaattaaagtttacatcaatattttgatttttaaattcactataataggataaaaagctatttttaagttcctcacttaaagaaagttcttgaaaattaagtttataatctaatgaattaattttagttatttcatgaaataattctactaagttaataagtgaagttgttttatcctctattatgcctatatatctttttttctctttcaaagtagtatgaggatcattaagtaaatctgtgtatcctttcacagctgttaaaggagttcttaaatcatgagaaatgttagtgatttcttggtttaacatcagttcttttttcttgttaataacatttcgttttctatatatagtaagtattgaatttatttcattacacaaatttttggaaatattgaattgtgtggaagtacgaataacttgattcgaagtgacatcattttttaagtcctgcaattgtatagtcacttgttttatttccatgtataacgatatatatttataagctaaatatattatagatagtattaaaattaggaaaaaaatgtatatcatttttagctatcctcacttttagtttagatatctcgtctttttaattatcaaatttcctataattaaaaagactacccctaaacctataccgaccatccaacactctaaatgaataacgcttgtatctgtagcgtattcttgaaatattttttcaaaaaattttgtaggagaataattgtatagaataatccattttttattaataaattttagcagttctaacaaaccaccaccatagtaataaataaaaatagttaagagaacagaaaatgcaccatttatttttaaactattcaataggtgagataatgctaaagcgccaaagattaaaggtgacatattaattaatgagattataaaattatttaatgttttatagtcttttttaaacaaaagtgaaccgaaaagtatacttatgatagtacaaattaaacataatataaagaaataaaagagaaatattataaactttccgtaataaatagtatctaatgaaatatcgaaagaaatgctttgttttactatgtttttgttctctttattgttgactattaaattcattgctgaaccaatggcaatgataaagagtcctgaggaaacaatattaacaagaaagaattttaaattagcgtatgggaatttaaaagtagttttatcaaagtatactaatgtaaaagcggctaatataattagtgttgcacatattattgtgtataaatatatgcttttgctatgtaataatctataattctcacttttgatataattaatcaatttcatcacctcttttaatatttaagaagtaatcttctagattagatacttcaattttaaattcatatacatctatattattttcaattagtatcttattaattaagttataatcaatcgaactttgatatacaattatttcttgcgcattaattaccctgtaatcaatagtttttatattttcttctaaaacttgagaagtttttgatgtattatcaacgcgtattaacagctgctgtttactttcttgggttaacttttctttactaatatctttaataattttacctttatcaatgaagacaaatctatcagctacttgttgcaattcatttaatatatgactagacaaaaggaaagtaataccgtgttcttgatttaaccggagaattaaattcctaaagtcttttattccctgtgcatctaatccgtttattggttcatccaaaattaataaatcaggtccatttaatagagctaaagctaatcctagcctttgtttcatacctaaagagtatgttttaaattttttattaacgttttctaattccaccgctttaagaacttcagtaatatctttagtatttgaaatacctctttgaatactaaaatacttcaaattctgaaaggctgtgaaattattaataaaattaggatgttcaatcatgaatcctattcgcttacgcatttgattttttatatcggattttttattaaataattctatatttccactatcagctttaatttgatttgctaataatttaaaaaaggtagatttaccagcaccatttctacctattaaagcacaaacttcacctttatgtagttcgaaatttatcggtaataatccatgattgtctttatattttttacttaagtcttttgttttgattactagattcataatattcgcccctttccaaaagacaatttaagtataaatggaaaggtcttaaattcctttaagtaaaatataaagaaagtataaagaaaattattctattataaatccaatcccccatacagttttaatgtaagatcggttagtataggtactcaatttttttctaatatttgatacgtggacattaaccgtattatcatctcctaaataaagcccttgaattttttcataaatcttttgttttgatattggtttttcaggagttttcattaataagcacaaaatattatattctttatttgttaattcgattttatttttatttaagtaaacatttctagtcgatttatctatacttaattctttccatactaataaattttgaggtggagattgatttaaatttcttaattgaacttcaactcgtgcagataattctttattattaaaaggttttgttaaataatcatctgctcctttatttaataatcgaactttttcttcaacttcagttttagctgatacaacaataattctgctcattaagtgtttttttatataagtgagtaattcttctccctcaatatgaggtaacattaaatctagcaatattaaatcgtaattatgtgtttttaaatactctaaagcttcatttcctgaataaactatagtagttttaattttcatttttgttaatgttaatgacaaaatatgtgcaatatctatatcatcttcaataattaaagcattatattccataaacctaagtcctctttcttcaattgaagtttttaattatattatatatttttatatgtattatttttagtaatttccttctatatataaaagtaatattttacaaatattgataatatccttaataaatcaaagtaaatcaccttaatagtttacaaaattacatcaaataatgatttgttagttaccttaataaaaactaaattttattaacgctacgcttaacgttctatcaataatactcaaaagcaaaatatataatataatctattattgtattattataataatagatatagaaaaaactacagtaagtttagataaaaaagaacgttgtaaaatgatagatacaaaagacaataatgaggtagctagttggaatcaaataggagattacatttaccttaaatttaaaggatcttttgttggaaaacatgaattatctatgattgctattctccacacattttctaataataatattcattataatcataaagatataactcgtccctcaatgggtccaccattaatataaaatacagtgctttggaagaaatatgtatctttatgtattcaatccaaacaaatattcaacaagtaatttagtttgaatgcaataaccccttcattaaaaaaatagtgaaggggctttttgaattaatcattataaatagttatgtgattttatgctctatttaaaaatatttttaaacggtcatatcatgtcgctctaaatatatatattaatatagtaaattaaataacaaaggattgattaaatgataagaaattatttttctaccccaaaaatgccaatattctttttctatactccttataccattgtgtatttagttaaatttatattcatgatacaaaatgaaacaacaagttggattagttgggtatggaatatagtaatatttttacttggaagctatacttatgcttggttaagttcatacatactagatactaaagacaatgttcttttacgttttttctttatgaaaagtgtcttatttagaaaaaagtttggaactattgctaaaatgacttttgatactcatcgtcgaataaatcctacgtttaagcaaaaaattgaagggaataaagtagattttcgtgaatcttttgaaacatatattaaaggcactttttttagtttcataatagttattattgttaaatttattttagcatggatacttcatccaatattttggatttcaattataatccatccaattattatgaaaaaatatcgtcagaaaatatcagaacatttggcaagcgaatagtataaaaatatcgaatagttttaaattgaatatgggagctaacacaaaagagtgatttgctcccaatatatttatatattagttatgtcggtatccctaataatattaaattcactttcaattatatcttcatcgaataacctattagactgattctttataatttcatcattgaaatttcttacaaatcttgcattactgttaattctttgtttttcaaatacttttttaagtttgtcatcgtaaacattttcattaaattcatattcgtgtagtaattttttgccgattaaacataattcgtttatagaataatcatcaaatataatttcattttttattcgagattctaatcctggatttatactcatcaattcatccatttctttaggatacccagcgaatattatcatgatatttcctctattatcttccatgaattttaaaatagtttcaatagcttctacaccgtagtcgttttcagatttgctgtataatgtatatgcttcgtcaataaataaaacgccacctaacgcagattttaaaactttttcagttttaatagctgtttgcccaacaaaaccggcaactaaatcttgtcttgtaacctctacaagcaaatctttttttattacacttttttgaaataaaatttgtgctattagtctagcgaccgtggttttacctgtccctggattacctttatatatagaatgtaaagaattatcttctactttaattccttttttctttttggcttcatttacaacgtgaacgcgtataaaatcatttgcttgttttttagcatttgataaaccaactaaattatttaactcctccattggattagaaatgttatttttagctattggctttatttcttttgtatttttattttctacatcttcttcatttttagtattttcaatatctttcttttcttcaaataattttataatgtttatttctttatttgattttatggatgagtgtttatcttgaagaaaagtattaaaaccatttgtgacattataattattaattgcgatattagaatttaataaataaagatctgttggagttacattagaatgtaattcttgaatgcttcctttagaattacaaaatctaaaatacattttttcattaaatttattattcaatattaacttttcaacatccaatgttgagttttttgtaactgcgatgcttgacgtttttaaagaagtagcttctaacgtcccttgaccaagccctatttttgttacttcagaattttttattttagctctcccattatcaaatatttgaagcagataatttttttttgaatctaaaggatctttataatcaatataagaattatctaaatctagtaaagaattgttaattgaaattgagggataagtagcatcaggatttaaattagtatatacaataattttagaattttttatattaatttcggaattatctttcatagtccattgatctcttgaataattgttgtacaaagagcaattagatatatgccatttgctttgacgagacatagctgcaccatgaatggtactattttctattacattgattcctttagaagaactgtgtagagaaaagatacttgaatttttaatccgaagattaccattgctattataaatattaaatttcttaaaatctttatggaaatttaaaaaagaaatattatcaagttctaacgaaccattttctatatcgaagacatcagtattattatcgttatctaaaatgatatttgatatggataaataccctttaatttcaaacctaaaattctttaaagttttcttttcgtcatcgatacttgtaatttttatatccatacctttgggtatttcaaaggagctcatagtttctttatttaagtctatattgtcaattaatattgtatccccatactgtgcattcgttatggcatttgtaagcgttgtttttagaaagccatcgcccactttaattattcttcccataattaatcctccttatatttagaaaaaatttataaaaattaagtagttatatcatactgattaaatatttctagcattctttctagaaaactatccacataagtttgtggggcgagtattagcgcatgtggtgccttttgataagcaatgtagaaagcatctagtttagtacatgctatttcaaaaatgagccaatcgctttctttatctacgaattttgcctcttcttcatttaatggacgttgacattgcacatcatataattgaaataattcattacttatatttttatgtactcttacttttactaattcattagcttcagattttttctttgaatagttttcatcaatatatacatctgataaatcacgaactttaacatcataaaactcatttccaagttcataggtaaaccaatagtcgtaattcatatacattaacgaatgaggtgtagcaaaaaaagatttttttgtgcttttttgcttaaatccaaccattttttctttaattaaggctttctgaagcatcattaattcttgacctggaaaaatatcatcataagctttttctcttatagaaaaatggtttaatatagactttaatgttgctacgtcttctgctcttccatttgaaatgagttgaatgaacaaattatagacattcctatgtagtttaggagttaaacttttaatgctaagcaataaccctaaagttgcataactatcataattaaatgaattgttttctatttgataataagcattatcatttttaccggttagctttatttgcgtattactgtcgtaccatggtagttcaggatcagtaaaaaaacgattaatagcgtccatatctcttcttatggtacgagatgtcttcattgtttttcttattaattcagaacgatttatcttttctccattaatcattaacagaaaaaaatataataaacgtttttctttttccataacttttcacctctataaatgaaaatacatttataaaaagacatatattgtccgtataaaatggtttactgaatattagaacaaagttatagatagataatataaatacatgtaagtaataagactttatgtgtctgattgattaaaaacgaatggagcgattaatatgagtgaaaaattatggaacgaatttgaaaaattttgggataaaaatgaaatagaaagaatggccgaagaatatcaatatttgtatgaacatccagaaaatacagatgacttttgttgggtgaatgaaaaggacaaattgaatacaaactcaaaagcaatttgttggggtgttcctaatcatattttaggagatatagacaaagcgaaggtaattgttggattacttaatcctggaactcatatggaaagtgaagtatcagagaaatgtgatacagtaggtaaatatattaaagaagaagtaaaaatagaaaaaaatagttcaagaaaagtggattctgagtcaaaagaagtttatcaaggtagtgtaaataacaaaaaagaattacataaattttattgtgaacatattttatccaaagaaaatgtaatttctaaagatttaaaaactttatataaaatgtataaaaaagatagaggaaatttagaatattatttgaagaataatgatgagtatgactttaatttaatagcatattatttaggaagttactattcaaaagtttttagtggaaaagaatcaatgtataaagaatgtataaaacattatctttctatttttgacaaaatgaatcaagctgaattacttggatatgaagttgaaaaagaatttgaaaaagcactttatgatattaaagtttctaatattgaattcattccttatcgctcatttgatagtaaatcgttaagaaatttacacaatttagaaagcagcaacttaagtgcaaaaattcttataaaaaaaatcttaagtgataaagatacaattgttattttaagaagcataaaagattggaaaactttatttaaaaatatttgtaatgaagaagggattgattttgaaaaagatatcgcaccagcaatatataaatttaaaagtcgaacaggtgcaatatctaagggcaacatagctccttataaagttgaaaaagacggaaatattaaaagtgtagatgaggtaattgagaaaatacgtgacataattagtttaaaagattttgaagcttatttagatgatattattgccaataataataaggggtgtttttaatttatgacagcaactacaaataatgtaatagaatataaaattacaaaacagtgcaaagaagcatttgagaatgtacttaatttaatcgcgaaaaaagagcgaaagattattgaaacgcaagatcttcttctagcttttgcttctactgcagatactggagcggcctattcattaggtcgtttttctataaccaaaaaaaagttagaagatgaaattaaacaagcaaaattaatggataaacgttatatagaaataaatgaagatgaatttgaacaaaatgatttatttatttctcaaaaaaagaaaagaaaaattcaagaatatataaaaacaaaccaggtacaatttatatatgaatcatcaacagaccaagcaataaagtatatgtcagaatatcctatttcaaacaatgtaaaagatataattgattttgcggaagagatgagatttcaaaacaatccaagcggtgggatagatacctattggattatcatgggaatgtctcaagatgaagattgtaatgcttatcatgttttaaaaaaattaatgttaaaatatgacaatatatttgatggcgataaaatgtcagagcgttttcaaaaccgtagctatttggcaaataattattatgatggaagaaatgaagaagagcaacgtaagaatgctacaataagaaatcgaatttctaataaattagcagaccctagttattcaatattagaagatattactacagatttaactgaaaaagcgcgtaataaagaattaatgcctgctattaagagagagagagaaattcatcatatggagatagctttatctcgtcgtgataaaaataatgttagtttaatagggaaaggtggggtaggtaaatcagctatagttgatggtttagccttaaaaatagttaataatgaaataccatcattaaaaaataagaaaatattacaatttagtgttaatgatttaatttctgtaattcaaggagaaacttttaaaggtattcaaagatttatgtctgaaatgaaaagagagaaagatgttattttatttgttgatgaaatccacatgttgggtaaaagtaaaggattaacagatattttgaaaccagcaatggctagaagtgactttcgtataattggagcaactactcctagagaatggcaaagttatatatcatctgacacggcattaactagacgttttgaaattattaaaatagatgagcctaatgtagaagataccgtagaaataataaatcaagttattcctatttatgaaaattttcaccatgttaattttgaaaaagaaacgattaaacttgcctcacaactaggaaaaaagtattttccgaaagaacagctaccagacttagcgtttactattttagataatgcaggagcaatttgtcgaattgaacaaggacagactaccaatttacaaactccttatttagataaaatgaatcgattaaaagaagacttaaaacaagctcaagtaaaagaatttaatgataaacaggttgaaaaattacgtcgagaaatacaacaacttgaaaaaaactattcacgtaagatgagcaatatagaaaaaattacatttgattacttagttactacagatcatataaaaaaagcaattgaacaaagattgggtgaaggatttgaagtagtcgaattaaaagaagatgaagattattctgatattgagattgatcgcctaagtcaattaaaagatactatgaaatcacaaattattgggcaagatgaagctattgagactatagcaaatgcagtaataagaaagaaattaggctttaagcaatcaaatcgtcctgtgggcgtatttatgcttttaggtactacaggagtaggtaaaacagaaacagccaaaatattaaataaaactttatatagagatgaacagaatatcattcgatatgatatgtcagaatatcaaaaggagcatgaagtttctaaattaattggtccaccaccaggctacattggttttggtcaagacggagacttagtaaagactgtgcttgaacatcctcgtgcagttattttgtttgatgaaatagaaaaagctcatccgaaaatatttgatgtattattacaagtatttgatgatggtagattaactaactcattaggtgaaacagcagattttagtgaaagtattattttattgacctcaaatattggagctagtgatattcagaatcgaaaagtggtaggtttaaatcaaactaataaaaatggaacagactttgaaatgatagatgaaagtattagagaagctttaaaacaatattttagacctgaatttttaaatcgtattgatgagatgattacttttaaaccacttaaccaacaagaaatttttgaaatcacacatctattgattaagaaagaagtagatttaattgaatctatgggatataatattgaattttcaaatgaagcgattagattgattgctaatttgtgttatgaacctaaaaacggagctagaccaataaaacgtggtatttctaagttactagaggatcgtctttcggaagaaataataagtggtaccttaaaaaaaggaaatactataaaagtaactgaatataataatgaattattgatagattatatttagttacaaaaaagacataaaatttataactataaactaatgagcctgggatataattcctaggctttattattatagtattatttagcaaaatcactgataaggagaaacgtaccataagggataaggtttttagtgtattaagaaaaaacatgtagatattatgttaagcaattttgtgtttaagattgtttagggagttattagttcttctttaatattatatgacacttcacaaaatagatatattagatcagatgttcatttgatttttaggtgattattaaataaaattgcgactaatcaaagtgaataatcgttagagaatcaattgcaacagttggacggtttaaggtattgacgtaacttgagtaccatgtacacagtatactatctcgatgattacaattttttctcaataaaaataaaaaagtatattaatttagcataaaattgataaaatagagacgtatatatgagaaattgataggtgatataatgggaaacttattaaaaatagaaaatattaactattcactagaggatttagataactcagtacgtaagtggaatatttcagcaaatgggaaatttttattgagatatccgactgtgtatatcattaatgacaaaaagagtgaaaataattttgaagtttatgtgggagaaacagctgatataagaaatagaacaagacagcatctaaatgctgatacgaaggtgaaatcattttgggaagatttttctgaatcaaaaaaatcatcaatgtatgtgattggtcatgaattatttaataaatctttgactctcgatattgaaaatagattaatgcagtatttgttgagtgtagagaatatatctagagttcataatagtagaacaaatcaacaaaatgaatattatacatcggaaatgcttgatgaaatattctctgaaatatggcaatctttaaataaaaaaaataaatcgttatttcctatagaaagtattattaaagattcagctatattcaaagcatctccatttcataaattgacacaagaacaaattaatgctaaagaagaaatactaactaaaattaaagaaagtatacttttaaatgaagatggacaattaattattgttgaaggagaagcgggctcaggtaaaacagttctaatgagtacattactttatgaactaggaaagtacaatttggatttagatgaaaatttagatattcatcttttagttaaccataatgagcatgtttctatatatagtcaaatagcttctaaattaggtatagctaataaaaaaaataaaattgttcaaaaacctactagttttattaataacaactcatcagatgaaaaagtagatgtagttattgttgatgaagcacacttacttttaactcaagggaagcaaagttatcaaggtaaaaatcatttagatgatttattggcgagagccaaggttgtggtaattgtatttgatataaaacaagttcttactactgaacaaatttgggaagtagataagttgaatgaatattttgataaagccaaaagtaatagtaaccatgtaacattgagaaatcaaatgcgtataaatagtgatatttcaactgttaattggatcagaaacttagttgattatcaagtaataaattctatacctaaagataaattaggatatgatattaaaatctttgatacaccagatgagttagaaaaagctattaagataaaagctacacatacagatagtggtatatcacgaatgcttgctacatttgattggaagtatggaaccaagccgcctaatcatgaagacttttggagagttaaaatcggaaattggtccatgccttggaattatcaattaaaagctaatagaaatcaagttagcttaccgtgggttgagcaagatcaaacaattgatgaaataggttcaacatttactatacaaggtttagatttaaactttgcgggcgtcattataggaccttcagttaaatatagaaatggtaaaattatttttgacaaaagtgagagtgctaataaaaaagctacgcaaagaagaacgttaaaagacggatcaaaacagtatttttcagaaatgcttttgaagaatgaattaaatgtcttattaacacgtggtgtaaatggcttatatatttatgctgtagatgatcagttaagagaagcgctaaaaatagcagcaatggatgaaattaatgatattgtgaaagaaattaataaatttagagatgctcgtaactggagacaatttcataatgagaaagatttatcattgtccattactttagaagcagctgagttattggaattattccaatggaaaacatctgatgaagtagtagaaactaatcgtgaaaggttagctgaagaaatagcagatgttttaatatatagctatatgttagcagacaatttaaattttgatatcaatgatattatccgtaagaagttagtgaagaacgcggagaagtatcctatagcaaaaagtaaagataacaaaattaagtataatgaaatgtcttagaaatttggtttttaaatactttaatattttcaaataaaaattatcaatcccagaaactcctcatattacctacacattttcgtgtgggcatggtggagagtattttaatttaaactttatcaacataaaatcacacctcctgtttttcttcatcacacagttgtggatccgttctgttgcaaagttagaaaaatatagctaattaccattttatcatgtcgttgttcccttaactggctaacatatgcctaatttcgtggcatggcgaaaatccgtagatctgaagagacctgcggttctttttatatagagcgtaaatacattcaataccttttaaaatattctttgacgtattgatactttgatatcttgtctttcttactttaatatgacggtgatcttgctcaatgagattatttagatatttcgatgtacaatgacagtcaggtttaagtttaaaagctttaatgactttagccattgcgaccttcgttgaaggtgcctgatctgtaattaccttttgaggtttagcaaattgtttaatgagacgtttgataaatacatatgctgaatgattatctcgttgcttacgcaaccaaatatctaatgtatgtccctctgcatcaatggcacgatataaatagttccattttccttttattttgatgtacgtctcatcaatacgccatttgtaataagcttttttatgcttttcttccaaatttgatataaaatcggggcatattcttgaacccaacggtagaccgttgaatgatgaacgtttacaccacgttcccttaatatttcagatatatcacgataactcaatgcatatcttagatagtagccaacagctacagtgataacatccttgttaaattgtttatatctgaaatagttcatacaaaagactcctttttattaaaattatactataaattcaactttgcaacagaacctaaataagtaatatcggttgataatacttccatgggacaactcgctttaaattgtctttgtaataaattgtctgttttataatacggtttacctatccttgtcgttttttaggtctaactcggcagttcaaatgatgcttctacataattatctgtactcttttatgattaattggtgatgtataacattgattaatcagtgctgtaatcttacgataaccgtaggtatagtggttagcttcacataattcaatgactttttgtgttacagtatcatttttataggttttgtttttccatcggtaatatgttgatttaggtatgtttaatacttctagtatcaatttgattgaatcgtttccttttaattgatccactaaatctatgactactgttggtaccacttcttttccaatgccttgtacttttttaaaatatccaattctatatcttttctcttattttctaattttaattgttctacttctgactgctcttctaatcctttaccgtaggtatattgtttaccaacgtgttgtgaaaatctataactttccccattttgataccatcgccaccaagttttcacttgtgttctatttctaatatttaattcttccataatttcttttgttgaaaatcctgctgctttcatttcaacagctttatactttgtttctactgaataagaaactcttttcatagaaaaaacacctccgcatgattcattttaatatgaattcaacgaaagtgtttttatataattcccactaattggggtcagtccaaatttaataaggtgtttttctatataaagtaaaaaatataaatgagggatgttatgtttgaattaatcgtaacagatatggatggtacgtttttaaattcacaaggtagtttcaatcgtgaaaagtttcaacaattattgattaaattgaagaatagaggtattcgtttagctttttgcacaggaaaacaaagtgaacgtgtagatgcgattgttggagatttagcgaaagatttatttattattggagacagtgcttcacgaattaaaattaatggaatgaatatctatactaaaacatttagcaatcaacttggatttgaagtgattgagacaattaaagctattgatgataatttagtaattattgtttgcacagatggtatggcttatgctgagaagcgtatttccgaaaaagaacgaaacatggttttaggttcatatgagaaagtaacttttgtagaaaatttaaatatgattaatcaagatattttaaaggttactatttttgattcacaaggtgagtgtttcgaacatgttaaaggtttaagtaaatatgaggataatctctatatcgtagctgcagaagagcattggatagatatcacacataaagacgttgataaaggaaaaacgattcgttttttacaaaacttattaaatataagtagtgaacaaacgattgtatttggtgatggtttaaatgatattcctttatttgagaatgcacgatacaaagttgctatggacaacgcttatccagaacttaaaagtaaagcaaatttaatttcaattaataatgatagagatggcgtaatagaaacattaaatacattacttataaatgacgataattgtagtgtgtgagtcaatatgtaattaacttttatacgataaaccgcatcattaaccgatacgcagaagcatatcataaatgatgcggttttttaatgattaatcaaatgtattgtgaaatatttatgcttggtcaatagtttattatatttgaattaaaaagtattatgtaaaaaagaaggcctaggaatacttagcaaagagtatttttaaaagcaagggagatgattttatgggcattaatattcaacgttttgaagaaaaggatgctaaggaaattgttaagctaattcatcgagcaatgtttgaaacgaacatctctgattattctaaagaagacttggtaaaagatgctgagaatataactgtgtcgtcaatcatcgaaagagcttcttggactcatttttatgtatttagagataaggagattattattgcgacaggtgcaattggtccctattgggatagtctaacagagagtagttttttcactatttttgttttacctgaataccaaggtaaagggattggaaaacttattattaatacattggaagacgatgagttttataagagagctagccggatagagataccagcatcaattactgcagttcctttttatcagaagtttggctataacttcaaggatggagttagtattactgatgaggaaggtatagtaagaatagagaaaaaactttgcgacttaaattaacgttaaaagttaaaaaatttttagtaaaattattagtcgtatttacagatgaaaaataataaatatactatatttaaaaaaagttcgttatttatctagtataaaataacgtgtccaatattaattattactaaattttgatatatttaaggaaagatcaagtttaggatggatgaatggcttatcagagtgaatatgcattagaaaatgaggtacttcaacaacttgagagtttaggatacgaacgagtgaacatacataacgttgaacaattacatgataattttcgtagtataattaatgaatgtcataaagataaattaaatgggaaacccctaacagatcgtgaatttgaacgtttaatgacgaggattaacggtaaaactgtatttgatagtgcgatgcaattacgcgattgttatgtactaaagagagatgatgatacggatctttacatagatttcatgaacttaaaacaatggtgtcagaataaattccaagtaaccaatcaaatcagtgtaaaagataagtacaaaagccgttatgatgtgacaattcccggtaaaaaattatatacttcaataaaatgaaatttgtaaataaaaaaataagagatagaaccacaatttcttgttctacctctttaagtgataaagtgttatttttcttttacaagttttttaacttcttctaattctttttcaacatctctattcggttttttagtcataagacttacgatataagtcacaatcaaacttgttaaaaatccaggaataatttcatataaattaaagaagtcattatattctcccaatggtttcacaaaaacaatccaaataatgacgacaactgatcctgatatcataccagaaatagctcctgtacgacttaatcccttccaatagagagatagtaataccagtggaccaaatgcagcaccaaatccagcccatgcattaccaacaagattcagtatagtatcattcggagtccatgcgattataatagatataattgctataataagaacagataatcgacctactaataaaaactcttttttatgtttttttgcagcttcttcgcctctaattaatttatagaaatcctcagtaagtgaactagaagtaacaagtagttgtgaggagattgtgctcataatagctgctaaaattgctgcaagaaggaaaccaccaaccaatggatggaataaaatttgacccattaaaataaaaagcgtttctggatcatttaatttaactcctctatcttgaacaaaagcaatacctatcaatcctacacatacagcaccaattaaactaatagccatccaactaataccaaatcttctggctgtttttaatttactaacggatttgattgacatgaatcgtactataatatgcggttgaccaaagtaacctaatccccaagcaaagaaagaaataattcccacaatagtggtacctttaaataaatctaaattagtcggttttaaatctgctgcttgagaaaaagcatcaatacctccgagctgcatcatggctacaataggtaccataaccatcgcaattaacataactacaccttgaaagaagtcagttaatgatacagctaaatatcccccaaagaatgtataagcaataacaatcaccgaaactagaataagaccagcatgataatctagaccaaacgcactattaaacaatttaccacctgaaaccatacccgagtgagtatatagtgtaaagaatacaacaataataccaccagagataattttaataatattagaatgatcattaaggcgatgtgtaaagtagttaggtaatgtgattgagtcattcgctttttcagtgtacacacgaagtcttggtgctacaagtatgtagttaacataagctccaatagttaacccaatagctaaccatgctgctgataaacctgtagtataaacttctccaggtaatcccataatcatccaaccactcatatcagaagcgccggctgataatgctgtgacgtagggccctatatttctccctccaagcatatattcactcaaatccccagttgcttgtttataaccatagtacccaataataagtaaaataaagaaataaactgcaagcataacataagttcgccaatcaggatttacttgacttgacaatgatgtagcaagaataaacataattaataactcctttattatatatttattttagttacatacaataattatacaaaaaataagatttatttaaagggtaaatttaaatttttggcgtttaatgaatcttattaattgtaaatactatatttatgtagcaatgaatatatttttaatattaatttttagtatataatattcattaattttgtatataacgataataaaaataaatatactatatttgagtaacatataaatcgatatatttgatttgtcatttattacgaatcccgttgacaatatgagaaaattccatataaaaacctgtgataaacgttggtgtaacaaggaaatcccgaaataccgtgtattttgatgaacaatcagctcattatttatgagtattgacgaggagtgtatctctctgattccctatatatattattcatttataaaaaataacgagattttgggattgtgcttgtacttgtacaatccttctgtttcttcgaatctacaaatcccattccttttccggtaaaaaattattgtgggctgttctttagcaatttcaatataagcattgtatagttatgaaaataattacgacaatgactgtttcattagataagtgttattgaaattgataaagagaattctaaaattggttagataaaataaatgaaagaataacagaatagtcattgtttattcaatagttatatatatagtttgcgacaaaaataaagacgaagtgctgaggagcacttcgtcgagtggatggttattaaatagttgtttattaaaagcgttattcaattttagaataatgtaaaattactttttatgatatttatctatctttatatcaatacgattgataaccgttagatacagtgatgtcacttgttatttctctaattcttcaatatctttgaacattgtctgtaacacattagcagtcatatcagtattataatgtggagactcagcttgtttatcttgttctagttgctagtactaattatattagtatttaaaatttaaatattttgattatataaaaaacgttgatacaattcacataatagtaagtctatattttttattttggaggaacatatttggggaccctatttagtctgattacttttatattattattagtcctaacggcatttttcgtagcgacagagtttgctatcgtgaaagtcagagaaacaagaattgcacaattgtctaatgcaggagagaagaaagcaatcgctgctaaaaaagttgtcgatcatcttgatgaatatttagctgtctgtcaattaggtattaccattaccgcactaggtattggtatggtcggggagtccacatttgaatttattctacacccactattcagtagtataggtattcctgaagcatggatacatccatttactattggtggtgcgtttgttatcgcgacatttttacatgtagttgtaggtgaaatggcgcctaagaccattgcgattcaaaaagctgagtatattacattactctttgcaaagccgatcatctttttctataaaataatgtatccatttatttggctattaaatggtgcagcacgattaatcttgaaaatgttcaacatgaaaccagctaaagagagtgaggtattccactctgaagaagaattgaaacaattaattcaagatagccatgaaggtggcgaaattaatgacagtgagttacaccatattaatcaagcatttaaattcgataatttagtcgcaaaagatattatgatagaccaagaatatgtcaaaacactcaatttaaatacgcgttttgatgatgcgattcaacaaattaaagaagatgcatttacaagatatccagccattaatgatgatcaaattgttggttttatccattccaaatcattatttaatgtggatcagccatctaagttagcgacatttgttaatccaattatcaacgttaaactgaatacgccattgaagcacattttggaaatgatgaaaaagaaaaaagttcatattgctgcagtttatgatgatgctgatttcaaaggtatcattactttagaaaatattcttgaagaaatcgttggcgatattgaagatgaatataattaatacaactgtttatattgaccctatcattgagatttgaaagtctgaatgataggggattttttatttatcgactttaaacattgacatctgactcaacttgtaactataacgattacatgcgatgagaagagtgaaaattagtagttgttttactgtagttggcgaacaagtattattgattaaacgagtcatttaagactagatgatttattgttatggacatattcatgatgctattgaagcagtagataaagatggcgtggacttaataggttatacaccttggggtattattgatatcgtatcatttacaaccggcgaaatgagattaattcatgtagatcgtgataacgagagaaatggctcattagaacgtacaaaaaaagcttcatttgattggtatcgtaaagttattgcatcaaatggtgaagaattataattgtgttacatcaataactaaatagaaaagacatcttgttatagctttaataatgatagagatggcgtaatagaaacattgaatacattacttataaatgacgataattcataatgaatgaaagaatatgtaatctacctttatacgattaaccgcattattaactgatacgtagaagcatactacaaataaaattaaaaaacagatggtagaatatgttagcatttaatatataaattagtttttaaattacataaaaactaatttaacaaagaatttaaaatgggagttttctatgaatatctatcaaacctatgcatgcttagtcataggaataatcgttttgggaatagttgttaatactattactactatagtaaaaagaaaaaaattaatttcaaatattaaacaactttggaaaagtaaaaaaactttagaagaatttatacgtccaaattcgagatttgattatcagtttaatcttcgacgtaagaattattctgatacattaatagatgataaaacatggacagacttagatatggatactttatttcataaaagtaattttaactttacagctattggagaaatgaaatggtatgctactttgagaaagatgtttactatcaataataaaaagttagtgaatcaatttaaagatgaacaatttagagtaaatgtatcttatcatcttgctttgataggaaaagttgtttatccactttttcctgatcaaattaaaccagtaaaacgaaataatttatttatgctatgtccatttttgccacttctaggtgcaattataatatttattaatatatcattaggaattttagtcattcttttttctattttacttaatattggtttatcagcctatctcaaaaaaagttatagtcaagatttaaaatccatcttctatacttctaaagtaatcaagcatagttattctttaagtaaaataaaaggcacaccaagtataaatattgattttcaacaatttaaactcgcacgttcattaagcggttttattggaaaagcagatgatcaagatattggtggtacatttatcatgctctttaaaatgagttttatgttggattacttcttttttcatattattcaatttacttacattaaacatcaagaagaattgcttcaatgttatgattacataagcacgttagataatcattattcattagtgatgtatcgtcgaacattacatacatattgcgaaccatctattattaaagataaacaacaaataacatttagtaatttattgcacccattacttacagaagcggtaccaaatagtttaaatataaagcataatattttattaaccggctcaaatgcctcaggaaaatcaacatttatgaaagctgttgcaactaatctcattcttgcacaaacattaaatactgctacagcaaaagcgttttcatacaagcctggattagtttatacatcaatggctaatacagatgatattttatcaggagatagttattttatgacggaattaaaatctattcggcgattatttaatattaaaaataatcaattggtatattgttttattgatgaaatttttaaaggaacgaatacgacagaacggattgctgcttcagagtcggtgcttaattatttagatactgagaaacattataaagttatagcggctacacatgatatcgaactttctgaatatctaaaagctaactatgaaaattatcattttaatgaatcgatagaaaataatcagatttattttgattataaaataaaaaaaggtaaagcaaatacgcgaaacgcaattgaattattacgtattactcaatttcctgaaaaagtatatacaagagcaaaacaaacaattaaataaaacctaaaccatatatatgactgtatggacatttaatagtatatgagcttctgctatattccatatactttggaatataaacggtttattaaataaaggagaaatgggtaatgacgatgtttcgtgaagcactgatatggatagtgcttctcttattcaacttaataaacacatttttagtacttgtgggaaaaacatcattgttcaaggttccactttggagcacatggttagtttggggaatagttactataattatagtaggcgttttgctttttagaaaacatttacaaaaaaagcagccactcattaataaaagtctcaataataaagattttaaagcggaagaattctttgtacaaatgcctttatatatcattgagaatcaaagcaatgtgatatacggtaacgaaacaataacgtataaacccgtttttgttaatagatttcataaattattgagtctctttggtattcaaacaaaatatagtctatatatgacttctagtgagaacgatgtaaaaataattcgtaaacatgtgttagcgaataaacatcaatatacaatgtatttgaataatgaagaaataggtacacttgagatgaaacagttcttcaaaagtggaggaaagcaacaacttccttatacgtttaattacaaatctgaagtgtttgatgtaagcaatccgttttttagtaatgaaactaaaattacagttgagaatgacatattattaaccgcaaagcgtagttttttagatatttcaaaaagtaaacgaactaaaaaacgaggcgaaaaacacactatacacattcacagtactagagtagagaaagaaatattaatagccatttacttacaatgcatgatcaataagcaaacacaataaatgaagtatcgctatagtataagttgacccgtatattagcgaataaagattttagtacaaatatatcctattatcataacggctaaaaaagatagtgaaggtaataaaacaaaccatattgacataactatctctccttactcatcatattttgtattgaaactctaaacttataagtaaaagtgatcgatgattttaaatatagtttaacaaaaatagtttaaaatgaaataacttacaattaatatattaaaatgtatataaaagttttaaaaataaaataagttatatatcactcacttggaaatgaatgaactaagaatgttacaatgcaaatgagtagaggagagtgtttatgaaaaagataatagtattagctagtctattaggtttgtcttttatcttagcagcttgtggaacatcgggagaacagaaagagccttctaaagagagtcaaaagtctgagaaatatacatatgagtattatgaagtgctaaataatggttcagaagatacacccaatgtggaaataaaatataaagataaaaatggtaaatcacatttacaaaaaacggatttagaacacgtttatgaacatattttaaatgatggaaataaaaaaccttatatcattaaagatggcaaaaagattcatgtctatcgtccaccatatatgatttatggcgatgatgatattgaaggacaagttaccgctaaagatgaagtgtctaaagagtaagaggtgagttggtgaagcataaagtattaaaaatgataagtataatgataatctttaatgtgacttcgctttgtatattgtctacaaatttagaagcggtaacctcaagcacgagtagctcaagttcgagtagtagttcgtcatcttctgcggttagaagttcaacgtcttcaagttcatcaatgagtcgttcaagtacaatgaatgcttcacgagttgcaaaacaatcaagtcagcatgcagcgcaacaagctagtcgaacaaatagtattacatataataacaaggcatcaaaattcaaacaagacactggtaaacttcagtctcaacaagcacgatcaatggtgtctacaagacatcgatatagaccaggagcctcatatacgtcacaatttatggctacttcatattataataattggttatatttttattttattacatccggtatgtataaaaataaaaccaatcatgtcgaataccaaaaaaacatgttgaaacaacaaatgaaagcgcatgagaaattatataccattaccgttcaaactaataaaggcaaacgtttagttgttgtcccgaaaaagcaatacgataaaattaaaaccggtgagaaagtgaaaattaaaaatagtgtattgcaataactcacattgagtaatccaatgttcttaatagaagggaattttaataaagttaaagtgtgttcatcattttaaaactctgtaatcgtctaaaatggcatattaaaaaaagcgtctcaatgatattgagacgcttaaaatttatctagccttaaatgattcaatagcggttttgatttcatctctaacacgttggaattctgaccaaggtttgccagcaggatcatcaaatccccaatgttctttctttacattaggcggcaatacaggacagttttgatcagcatcactacatagagttactactaaatcggattggtttagtatagtgttgtcaattaaattagaagtatggtttgagatatcaattccaacttctttcatcgcttcgattgcctttggattgacaccgtgtgcctcaataccgccagaatatacttgccattcatcacctaagatttttttgccccagccttcagccatttggctacggcatgaattacctgtacatataaagtaaattgtttttttatccataaatagtctcctctttttttagaaaataataagtgttagatataaccctaacagtgtgataaacagaacaggaatcgtaataacaatacctgttttaaaatatgtgccccatgaaatttttactcctttttgtgttaaaacgtgcaaccatagtagggttgctaaggagccaataggtgtgattttaggtcctaaatctgcgccaatgatattggcataaatcatgccgtctttgattaaaccggtagttgcagattgtccaatagcaattgcatcaattaatacggtaggcatattattcataatggctgaaaggaatgcggatataaagcccatacctataacactactaaacaatccatagtttgatatgcttgatagcatattagctaataatgcagtaatacccacatttttcaggccaaatacaactaaatacattcctatagaaaagagcacaatattccaaggtgcgcctttgatcacttgtttcgtgttcacaacgcttgattgataggccaatacagtaaatataaacgcaattgaacaggcgattatcgatactggaatttgaataaattcactaactatataaccaataagtaagattgataaaacaatccatgaaaacttgaataattttgggtctttaatggcttgattaggtgttttaagatttttaatttcaaaatggttaggaataacttttctgaaatatagccataatacaacaatacttgcaagtaaagagaatagattcggaatcatcatgcgacttacatattcaataaatccaatatggaagtagtcagcagaaacgatattaaccaaattacttacaattaatggaagagacgtagtatctgcaatgaatccacttgcaatgataaaaggaaaaatgactttttgattaaatcctaaatttcttaccatagctagcacgattggagtgagaattaatgcagctccatcgttcgcaaagaaggctgctacaatagcgcctaacaacataatgtagacaaacattttaaacccatgaccatttgaggctctgaccatatgtatagctgcccattcgaaaaatccaatttcatctaaaattaatgaaatgagtataacagcgacaaaggttaacgtcgcattccaaacaatccctgtaacttctagtacgtctgaaaagctaacaacacctgtaatgatagcaataacagcaccgattaaagctgtaactccaatatccaaacctttaggttgccatatgataaaaattaacgttaatataaaaatagtgattgctaatatcgtcattgttaacactcacctttctctactgtttcacatatacatgggacagtacaggaactcaatagagtgagtcgtgatgtaacgttatccaatacgtcatgattcaatttgtataaatttttattaccatcctttctagatgtaattaaattattgtcttttaatactttcatatgatgacttaatgtgggttgagaaaaagaaaaatgctctaataaatcacaagcgcataattcaccacaagataacaaatctaatatttcaagacgactactatcagccatcacttttaagtattgtgaaatttctttataattcaatttttcttcttcctttctactaggaaccttttataacgttgataatttttattgtcatttgataaattatatacttgcttaactcctaaattattaactggtttaaagtagactctaggtctcattataatcaataacattaatattctgatattcgataaggtatgacaaagtaattatcaaaactttcatttttaattttatttatccaaaatgattcatcttcttttttgttactaaaaaggtcatcacgttgatttagcgtaactaacgattgattaaccacccaccaattatggcctatattagctctgtttaaatcttctactaaacgtttagattctaaataaggtgttttttctgctagtgttacgattatcatctgtgttaaatttttattttgaattttaggtaataatgtttcaacattattggtagtttgagttgattttttctttaattctctatgatgattttcactagaatcaagtaacagcaaggtatggcctgtaggagctgtatctacaatgacgtaatccatgtcgtcttgattctccataatgtcactaaaggctttgaaaaatgctatttcttctgtacaaggtgattttaaatcttccataatataatcgatatcgtcttgtggtgtatcatcattcactgtggctagtacttcttttttatacttttctaatgcttgttcttcatcaatataagcagtatttaaattacttgtagtttcaacattaatttctttagtagggtcagtagttgctaaaagaacactatatcctttattagataatgttgtagctaattgcgttgctactgtcgttttaccaacgccaccttttcccattgtaaataaatattgaactttactattttcaatttcatcgattaatttattgaattgcggatgatcttcaacaataaagtcatcattttcaattaagttatcatcatttaatagattagttaaactttctataccttcttctttctgctttttatatggaacgtaataagcatgattgttatttaaccattcagtaaaatgattaatgtttttatcttgttctgatttcatctgactcgaaattaaaccgtgactttcttctatatagttgttaatgattactttgaatttagaaattgatagttgttgtaattcttgttgcgctctttgaatttcatatatagaagagtgagtaggtcttgcaactaacatcatggtcgtatcatcttggttacgtagtttttcaagtgctgaattatatttaactctattttcatttaaacctgataattgacctaagcaagaagcgtcattactcgttgtatttaaataatctgtccatgcagaaggtaattcaagcattctcaaggtgtgacctgtaggagctgtatcaaatataatgaaatcaaattcttgttctaaagttttatcggataaaaaatttgtaaattcattaaatgctgctacttcaactgtacatgaaccacttaactgttctttcatttcagaaagcacatcttctggtagaataccttcataaggttctatagattgtgctttataatcgtctgcagcagcaatcgggtcaaaattggctatagagagattaggtataggttgatatttagttaatttattagataattccatttgaaatacatcttgtaaattactagctggatcagtacttactaaagctactttctttccattctctgctaagtttaaagcaataaaacttgatatcgtcgttttgcctacgccacctttaccagtaaaaaacaaatattttgttaactcaatgttatctagattcaatttatttaaatatttaacagcatccatctccatcacagcatcctccatttctcatttgattaactgtaatgatttcatcggcttcttcttgggtaatataagcgcccgttttagctataccgccttctataaaagtgattggtaaaacttcatcacctttttcttgaattaaacgaataacttcttgatttttaatgaattcattcggattattattcatattataacgttgaacttctatttgattttgttttaaatattcattgatttggttcgcttttattagtgtttcatccggttctggaccacatacgccagtagaacagcacatagcttcttcgtatatttcaatatttaacattatactcacctcattaattaatttacgattatagattaacatctatatagattaatgtctatgttcttatttgagctttaaaaacttcattaaatttaattcttaataatataatttataaaaaaattattttaatatttttgtgagcaatacctaagtttatgtaaaaattatagtttttttcttgcgataatatggatattgatttacatttaatacatcaaaaaaaattgatgtattaaatgatataaaactacgttgacaataaggaggcgtgcttgattgcgagtaaaccatgcaagtactttaactgttggttattttgtaagttatttaaatcttgttatgctatcaagagaaatcaatttaaaagaagctacaatatatatggaaaaggagttctttaaagggaacattaatcagtatggcgaatcaacaaaaaataactataaacaagcaattcaagaattgaaataaagataatataaactcaatgaaatattataaaaaggatgatcttttatggaagttattaaagcaaagactgatatgagtgaagatcaacaatttgacttttatgaaaatatgtttaatgcacttgccgataaaatcagattaaaaatactaaatcaaattagccaaagcttcaataaatcattatgtgtatgtgatttagaagagttattagatataaaacaatctaaactttcttatcatttaaaaaaattagtagatgcaaatgttcttattgctgaaaagcatggcacatggaattattataaaattaatgagcagcaaatacaggttattttaaatgaagatacttgttgtaagatactttaagtatcttttttaatgatgtattaatcaattttttttgattaatacatcaagaaatattgattaattaaatttggaggcgttatactcatgttagattcaattatggaatttataaaaacatttgtgatgttgttttttgaactattcatactatttatcatcgtgagctttatcgtaagtatcatccaacagatagtttcagaagaaaaaataaaatactttttaagtaaacctaatcaagctattaattatattttgggaatggcttttggtgcgatgacaccattttgttcttgttcaactattccaatacttgcaggtctattaaattctaaagtaccttttggtccagcaatgagttttttaattgcgtcacctttaatgaatccattaatgatatttatgttatgggccttattaggttggaaagttgctgttgtttattttattgtactagcaatctttagtgtcttaacgggtctagtattttcaaaaatgaatttatctaaaagttataaaggtgtaaatgttaaaggcgatgggtttttcgctaataaaaatggatctcgttttaaacaagcattaaatgatgcttgggcattcttatatccaatgattccttacttatttatcggtgtatttattggtgcttttatatatggctttgtacccgaaacatttattactaaatatgcgagtggaggtggcattatatccgtatttattgcttctattataggtattcctatgtatattagacctgaaacaatgttacctatagctgaagcattagcttcaaaaggaatgtcgcttgggacagttgttgctttgatcattggtggtgctggtgcaagtattccagaagttgtattattatcgaaactattcaagaaaaaatttgtaatctcattcgttatcgccattttagttgtagctatttctacaggtttgatggtgaacatcgttatttaaaggaggtgagataatgggagtcaaagacgtattaaaaaaattaaaacctcaggatcaatcatgttgttctgtagaaattgaagaaaaaacagagaagaatgaaaaagaacagcaggataataataattgttgtaacaattaatttagaagtctgtaaaatatatgcttctaataaatgaacgacaaattccaatgtaatagtatggaatttgtcgttctttcgtttcagttaaggaaaatgttgttgtttatttaatattctttaagacttataacaaaaagacgttaattaaaaaccgcatcattaaccgatacgcagaatcatattataaataaaactaaaaatgaggttgtatataactcactctgaaattgtttgaatatatagtatctttagtaaaatgcagctattgtggcgtaaaatttgagaatcaaaaaatgattaatatagtttgaaaagactgaatataaatactagaaaaatagccagtaaatgagtttattatgaattcatttactggcttctttaaataatgatctagacaatttgcttttctagacctactttgaaatgcgttattttctttaagaatagtaatatatgatttgtgttgataatgctaaccttggtcagagtgtattgtcatgcgatagttcagatgagattttttaattaaaaccttgttttaaacatcgatgacaaggtctaatgtaggacgtgtagacatcattttcagaatgatataaataaatccataaatggagataaattgaaactatttataccctatgggggtatgtgttatagtataagtagctttactataacattttcattgggaggggttaatttgaagaataatggtgaagcgcataatcatcaaaatcacatgaaacattccaatcaaatgcatcatgataaccatgcctcacatcatcatagtggccatgcacatcatcatggaaattttaaagttaagttttttgtttcattaatttttgcaatacctatcattcttttatcgccaatgatgggtgttaacttaccttttcaattcacatttccaggttctgaatgggtagtgttaatattaagtacaattttattcttttatggtggtaaaccgttcttgtctggtggtaaagatgaaattgctgcaaaaaaaccaggcatgatgaccttagttgccctaggtatttcagtagcttatatttatagcttgtatgctttttatatgaataacttcagtagtgcaactggtcatacaatggactttttttgggaattagcaaccttaattttaattatgctattaggacattggatagaaatgaatgctgtcggaaatgctggagatgctttaaagaaaatggcagaactgttacctaatagtgctattaaagttatggataatggccaacgcgaagaagttaaaatatcagacatcatgactgatgatatcgtcgaagtaaaagccggagaaagcattccaacagatggtattatcgttcaaggacaaacatctatagatgaatccctagtcactggagaatctaaaaaagtacaaaaaaatcaaaatgacaacgtcatcgggggttctattaatgggtctggaacaatacaagtcaaggttacagctgtgggagaagatggatatctttctcaagttatgggacttgttaatcaagcacaaaatgataaatctagtgctgaattgttatctgataaagtagcgggttatttattctactttgctgtaagtgttggcgtgatttcttttattgtttggatgctcattcaaaatgatgttgattttgcattagaacgtcttgtaactgtgttagtcattgcttgtccacatgctttaggcttggcaatacctttagtcactgcacgttctacttcaattggtgcacataatggtttaattattaaaaatagagagtctgtagaaatagctcaacatatcgattatgtaatgatggataaaactggtactttaactgagggtaacttttctgtgaatcattatgagagctttaaaaatgatttgagtaatgatacaatattaagccttttcgcctcattagaaagtcaatctaatcactcattagctataagtattgttgattttgcgaaaagtaaaaatgtttcatttactaactcacaagacgttaataatattccaggtgtcggattagaaggtctaattgataataaaacatataaaataacaaatgtctcttatcttgataaacataaacttaattatgacaatgacttgtttactaaattagctcaacaaggtaattcaatcagctatttaattgaggatcaacaagtcattggcatgattgctcaaggagatcaaattaaagaaagctcaaaacaaatggtagctgatttactatcaagacatattacaccagtcatgcttacaggtgacaataatgaagtggcacacgctgtcgcaaaagaattaggtattagtgatgtccacgcacaactcatgccagaagataaggaaagcattataaaagattatcaaagtgacggtaataaagtcatgatggtcggagacggtatcaacgatgcgccgagtcttataagagccgatattggtatagcaattggtgcaggcacagatgttgcagtggattcaggtgatatcatacttgttaaaagtaatccatcagatatcattcatttcttgaccctttcaaataatactatgagaaaaatggtgcaaaacttatggtggggtgcaggttataatattgttgctgtacctttagcagctggtattttagcatttatcggcttgattttatcacctgcaataggtgctattttaatgtcactaagtacggttattgttgcaattaatgcctttacattaaaattaaaataaaagataggagttttattatgattaaaaaattattttttatgatattaggatcattactaatattatcagcttgctccaataatgatgaaaaagataaagacactaatgaccaaaaaagtgagagccatatgaagcataatgatgaaagtaaagttccagaagatatgaaatcgactaatgagggtgaatttaaagtgggagataaagtaacgattacagcagggcatatgtcagggatgaaaggcgcagaagctactgtaaaaggtgcgtataaaacatatgcctatgttgtaagttataaacccacaaatggaaatgaaaaagtaaacaatcataaatgggtcgtaaacgaagagattaaagatgcacctaaagatggatttagtaagggcgatactgttaaattagaagcaaatcatatgtctggcatgaaaggtgctacagccaatatagataacgtgaaaaagactactgtttacgtggttgattacaaatccaaagataatggtaaaatcattaaaaatcataaatggatgacaggaaatgaactgaaagcacgctaaaaatctagttctaaattgagaaataaatagatataaaaattaaaaagaagtcttagaagaataacatttatcaaaaaacgcttaatagacgtgaagaatatcgtctattaagcgttttatattaatattttatcagtacattgcatttttctacgccaaacaaagtagttaaatgatactagtcttaatttttcacaacatactattcgcaatcataatacgcaaatatcttctcgtaaactataaatgatgacctttaaattattcgtcgtgtttaagcacgcgagtcatttcttcaattttgccggcatgtaatggaacatggaaggcatttagtactaataattcattgagtgtttggcaaccagcaacgggttcgttaagttcttgtgataattgttcatccgttagtttgcgcgcacgttcaggaagtgtttttaagttttctttaatcgtttcgattgatggaacatcttgtccttcccagttagcagggctagatccgtaaccaaatagtttagtatatttagcgatatctacggtattttgactacctattgataaagcagaatcgaaaatcgttaaaacatgtccaaattgccaatgtaacgtatttggaaaaacatcattttctttatctaatacgcgttcaacattccaattatcatacacagatagtaaatgatttacacctatatcaattacatcataaactgttttatcattcatttacgtttcctcctatatttaaaaagtgtagtactaaaaatctacccgttaaaaattactcacaaacactatgattagaagtaccagttttatttactgtatagcatgaatggatgtaaagaagatgaagactagacaagtaatgtattttgaaatcatcatctcatttcaccaagtttatcaagaagaattaggattgaaataagcttagcataagcgtattttcaactcagtcatcgactgctaacatattaaaaatgcccaagacatttaatgatgtctcaggcttttttatctatttgttcaataagttacgtatatattttttatttatatagtcattattgtggttttaaaataactttaatattgttatcttttttctgatcgaaaatatcgtacgcttgttttgcttcttctaaaggcatggtatgcgttatgatttctgttggatcaaacacttcatttttaatcatttcatataattttggcatttgatgaataactggtgcttgaccactttttacttgaacatctctattaaaaattaaatctactggaaaattatctgcaggtgtagcataaataccagttaattgaatggtaccaaattttcttactgattctgctgctgtaataattggactaatattaccacgttgcgctgagtttgaactcatctctaaatcatcttgagcaacttgtccatccattcccacacaatctatcacaacatctgcaccgccacgtgtattttcacgaagtaattttccaatattatcttctttagaaaaattatacacttcagcaccattgaattttttcgcatggtttaatctatgttccacattatcaatggcaatcacacgttcagcaccttttaatttagcaaatttttgtgccattaaaccgattggaccacaacctagaacaataacagtatcaccagattttacgcccgcatgttctacactccaataagctgttgggacaacatcagataaaaataatacttgttcgtctttcaaatcactatctggaactttgaaagaagagaagtcagcaaatggaactcttaaatactctgcttgtcctccccaatggttcccgtgcatggcaccaaaaccgaaaagtccaccattgtccattttccaatttgcaggggatggattagagttgtcgcattgagattccatatggttattacaatagaagcagtcaccacaaccgatgttaaaaggtataaccactctatcacctttttttaaagtcttaacgtcttttcctacttcttctacaattcccattggctcatgtccaataacaaaaccaggatccataaataaatcgccttgatgataaagatgtaaatcagaaccacatatacctgaagcggttattttaataattgcatctgtggattcttctatcgttggatcgttcacttcacgaacttccatatttttatgaccttgataagtaactgctttcattaatatcgccctcctcctgtcaatctaccccttgtaacacattataaacgctgaagagtcatatattatgtttagatgatacggatatgtccgaattagaagctactttagtagaaaggatatagacgcatcgaagctgcattcatttatggaaatgaagaaaaagtagaggaaggtcttgtaacaataagacttaaacgtgaagacgtatttatcacaactagacgatgttagacgagacaatgtggaaaaaatattattaaacattagacaatcttgatttagattatttggagttatattgagtacaccaaccaagtacaaatgaggtggtaatgattgatacatgaaaagggaggaaagattgatatcaatcagacaaagttaaagtatcggagtaagtcactttaatagagaggttttgctttagaaatttacatgatgatgagcaatactattgaagaagataaaaaaagagattataccatcgtataatccccgtagatacataatatataattgaactcccaactaatacatagtctttcccctaaggccattatgcgactatgccttgtatttgtctatgttcaaatatgttaataataaaaaaatgagtataacgtttatataaacgtgtacatggtttttacacgatctgcctagttaggtcataagaaatgaactatctattcaaggccatacgcaaatttgattttatatagttcatggtcacttaaatgaaattcattagtatggaatacatatttaccaaatatatttttagcttctttaggtgagataatatattcattttttaatttttctaactcttgagctacacttgttgcaaaattatattgatcatcacgtgtgtgataatcattaaaaccattttctgattgttttattaagttttctatttgagttgaatccttattatttcttgataatctagattttctaagtctttctaacgttttcatcgctttagcgtatttatcttcgattgcttttactctatttaatgtttttaatgaggctctatttggtataacgtgacgtgatgaatcataagcatatttatcttcaattgcttttaaagtgtcattaaatttatctgtagcttgattttcattgttttgacttgctctatttaattcactatatgcattttgtatctctaattgcttggcgacttcttttaaatattgtgttaattcattcatctagacaaactcctttatttatttagttttctttattgaacattttcttcatttgtatatatatatcacttaatacatataataaaacattatgatttaattataaattatttaacaagatataattatttagtattaagactattatatatattaaatgtaaaaaaacgataacaatcaatattaaatattgtaaaaagtatagttggaatctataaccgatgaactgtttatcttaaatagtgagagaaagactaacagaaacttaatataatagttaagtaataaaaaatgcccacatctcatgggcatttttatgattacattgtactgatatcaataacaaaacgatatttaactttagatgccaacactctttcgtaagcatcatcaatatcatctgctgtaattaattcaatttgtggggcgatatgatgttcagaacagaaatctaacatgtcttgagtttctttaataccaccgatagcagatccagcaaatgaacgacgatgaccaattaaattaaatacttgtaaggatacaggctcagctggggcaccaacattaacgagtgtaccatctaaggctaataatttaagatagtcatctatgtctaattttgcacttacagtattaataattaagtcaaatgaaccagcaagttctttaaatgttgattcgtcacttgttgcataataagctgaagcaccaaattttaaaccatcttcttttttatttaacgtacgtgataatacagtcacgttagcgcccattgcatgtgcaatttgaactgccatatgtccaagaccacccataccaatgattgctacattctttttaccttcataggctttccaatgatttaaaggtgagtaagttgtaatccccgcacacagtaaaggagcagcaacctctaaactgatattgtcaggaatacgtaatacgaaatcttcttggacaacaatatgtgttgagtaaccgccttgtgttttctcaccatatttgtcagtacttgcataagtacctacacttccatttaagcagtattgttcttcgttatttttgcagttttcacattcaccacaagaatccaccatacatccaacacctacacggtcgccaactttatatttagtgacgttaggaccgacttctttaacaatacctgcaatttcatgacctggtacgagcggataatcgacagggccccattcttctcgagcagtatggatatcagagtgacaaatacccgcatatttaatttctattaatacatcatgtttatctaaatcacgacgttgaatttcagtagcgaaaaattcagagtccgggccatttacagctcttgcttttacattcatcatagtcatttcccctaatatatataagatagaatatacgcgtttgtatgattcttcatattgacaatagagacttagattaattaagtcaacacattgaactcaatatgtatagtacaaggtgattttaaactaatcgttgtgaggcatgtttcaatgacttcatattagaaaggaaaataaaaacagataaatagacttttaatacaaatgtaattatattggtaacatgttgagggacatccaagagatatttctgataaatatagaagtggaggaacaaacgatgaacattggtattattggagcaacaggtaaattaggaactaaagtattagatgaagcacaacaacggtaactgcgattgtaagaaatgctgctaaattagatgatgataaagatgttaaagtgattgaaaaagatgtatttgatttaacttcagacgatattaaagatttagacgtggtagtcaatgcatttggcgcgccattaggtgaagaagaagtgcacgttgaagtgggacgcgtatggattaacatattaaaagatgtagatacaagagccattattgtcggtggtgctggtagtctatttgcagatgatgcacatactatacatgttatggatacaccagatttcccagaaatagtgaaaccaacagctaaaggatcaagtcgtaacttacaagacttacaacatgctgaaggaataacttggacttttattagcccgtcagcggaatttgactttgaaggtaaacgtacaggcacctatacgttaggaaaagatcaattattatttaatagtaaaggtaatagttatatcagttatgcagattttgctattgctatagtagatgaagctgaaaataaagcgcatattaatgaacgtttcacagttgttggtgaagaagaataatagtgactctagatgccctttaggagaaataattaaaaaggccaatctaaattaaaagtaattagccaaaatataatggtagccataaaaacattaaatgaactgtttaaagaatgtcctcctatgtatctacatgatggtatttaggaggatattttagtgtgagactacattattttgttttttaataatagattcataactcattaattatataaaagtagggtattaaatataggaagactttaaaggagagaattatgattaatattaaaaaagttacaagaattgtattacctttagcaggtggaatggttattgggagattaacagctaaagctcaaaatgattataaacattatgaaaaaccacctttttcacctccagctaaagtatttccaattgtatggccactactttatacctcaatgggagtagcttatcaattatcatatgcgcatgcagctcataaaagagagaaacagtctataacacgtgctcattatgcacaattaggattgaattatgcgtggacgatactttatttcaatttaaaactgagaaagacatctttaattgaaagttatgtattacttgcagctggaaatattactgcacatcgtttttatgcatctaataagtatgctggtttattaatgttaccttatgtcatttggttaagttacgcaagttatttaaatggaggtaatttaatcttaaatgaagataaaccaggttatactagggattaacactgagtgatatgtatgacagaatatatagtaggatatattaagtgacagtaggagattaattttaagtattattcttttataaattatgtaaaaaaagcacaagcacgtatacatacatgcttgtgctaaaatttatgtttaaacagggacaacatttgttgcttgttcgccacgttgaccttcagtgatgtcaaactctactttttgaccttcttctaaagttttatatccatcagtagcgatacctgagaagtgaacaaacacatcgtcaccgtcttctctttcgataaatccaaaccctttttctgcgttaaaccatttaactgtaccgttattcatatagaatacctccaagtgcttttgcacatcatatttgtaacaaattcataaattaaaagagaatattctataaaaatatactacaatccaaaatacgagcttttattacgtgaaaccaactatacaccttttgaatgaataagtacagcattattttgaaatttagcataatttcttttggaattataaaaatacatagataacaagactaagatttataatttattaagatcgttatttgacatatatcgaaataaatatatgtaaaatgaatgctacggtggcgaaacatctaagattttaattactttttaatatatcctaaattgccaccaacagtttcataaaaatcaaaacgcatgcctgatttgataactgagccatttaaatctttatctaaaactgtaagagctaattttccatcaggtaaattctttgttgtaaattgaacagtatattctccagatttaaaacgatgtttcttaatatctaatacgatgaattgagttggatcttttcgatgttttacttctagatactttaactcagagtttttagaaagtatttttaagaacaccttatcattctcttgagagatttttagtaatgtaggatgcattctttttttgtaatgtgttcctttaaacgaatagtaatatatatcgtttttctcatgaagcggcttatcatcttttttaagatagaatttaacaaaactgataatgtcttctttattcccctcacgtattagtttgatggcttgtcggtttaaatcatcatctgcatagtctaaagcatcgaaatgttcatctaccatatgaatgatattttgaaaaataggaagtaactcatttatgtttttaataaagccttttttatagaatttagcttctaaaacatctttattaataatacgatatagtaaattaggcattaatttattatttttatacttactcattaagtgacgataggcttcaccttgccatttcatacgattaatatgtgttgatttttctgattttactaaagaaatattatcgtcgtaacggttagcacaataaaccacatcttgtgttgtactaatacgtttagtattgaaaaagacttctgcgaaaaattgtaaatcttctccaaaaatcatttctggaaattgaatatgattctttttaatgacgctagctttaatcatacgaccagcaggtgctaaatgataaaatgattttctaaagtgttttaaatctactttattatatgcaattttagatagagcaacgccacttctagctatgcgatcactatgcacatattttgttaagcctgtagcatagtctgtcttgtttgtttttaaaagtgtatataacttttctagagcatcttcaggtaaccaatcatcaccgtctataaacatgatgtactttcccttacttaaatcaatagataaatttcgtggtttcgcaggtgtacccgaattttgatctaattgaataaatttgtaattagaaaaactgtctatttttttagaaacaatatcaacggtttggtcagtagaacagtcatccaccacgattaattcaaaatctctcatatccatcgattgttttaagacactatctaatgttttattaataaatttttctttgttatacgtactaattaatacacttactttaggcctatgattgatttctttactctttataaccttcatttttatactcctttaattagtaatctttttgataatctaatgtattttaaaaagtagttaaaatacaaataataatctaattatatttaatataatcaattttttctatcgttatttattgtaataatctaattatagattatgttatatattttgtttttaagtattaatatatctattatcatcacaataatctttaattatctataaaaatacctaaattaggtaattatgatatatatgagattggaaaataaaatgaactctgatttatttataggaaatgcgagcgttcccaaagaaactcaaaaatgttataattatagttgaaaacgattccaacaaattgttatttgatatagctatttaattattgaattaaatgactatatcaagtaataaataggagagatagaaatgaaagatacagatcaaatacatactaaaaatactgaagaacaaggtattacactaccctatttaaaaaaagcagttattttttctattacatttggtttcttcggagtaaacatagcatttgcacttcaatcagcaatgatgggaagaatatttcaaacgctcggcgccgaccctaataatttaggttggttttttattttgccgccattagcaggaatgattgtacaaccacttattggatactattctgatagaacttggactagatttggacgtcggatgccgtatcttttaattgctggtcccattggagcaatcgtattagtcctactacctaatgcaggttcgtttggatttggatatgcatcacttatggcgttgtcatttggtgcaatcatgacgttacttatggatttgacttcaaatgcgtgtatgcagccctataaaatgattattggagatatggtaaacgaaaaacaaagagatatggcctggtcatggcaacaaatcttctcaaatttaggtggtattattgctacactattaccatttttactaacaatgatgggaatgaataatgtagcgcctaaaggggaagtaccgatgacagtaaaaatagcttattatattgcagcagcggtattactcattgcttctatttggacggttctttccgttaaagaatatgaacctaaaacatataactattatcacggcatttcagatgacaataggaatgagaaattaaatttatggcaactgttaaaaactgcgcctaaacaattttggcaaattagtgtagttcaattttttaactggtttgcattaatgtatggaatgcgacagacccttcttcagcaggatatcaagcagcaggaaactggtatggtgtgttatactgtatacaatttttaagttcagttatttttggttttgtcattgcaaaatctaaaccttctcaaagaaaattctggtatagttttggattaatttttggtggattaggtcttatttcaatgttctttattcataaccaatggttactcattatttcatttatattcattggtattaataacttaacgatgaatactcaaccattcacactattaaccgaagcaattgatggagaaaattcaggtgcttatctagggttatttaatacaagtatttgtctaccacaaattgtcgcttctgtagtaagctttgcacttttcccactattaggaagttcaatgcctgcgatgttattatttgcaggaatcatgatgcttctgggtgcaatctcagttaaatttattaacgcaaaatttgaatgaaatattaaaaaataaaaaaatttatttataatttgtaagagcgaaaaataatttttcgctctttttttataaaaactatcagcaatgtttcataaacaatatcatgatgtcattaaaaatttaatacatttaaggaatatcaaaccttgaagtataagtgaagacatactaatgattacgcggtaaatcactcgctatagaacatcattcatttaattaatattgacattattaaaaatctctgtacaatttaaatcgtaataattacgatttaaaaggagagaatataaatgagtaagatacctgtaactgtattaagtggttatttaggttcagggaagacaacgttactaaatcatattttaaatcatcgagaaggccgtcgtattgcagttattgtgaatgatatgagtgaggttaatattgataaagatttagttgctgatggtggtggactgtctagaacagatgaaaaattagttgaactatctaatggatgtatttgttgcacgttacgggacgatttattaaaagaagttgaacgacttgtacataaaggcaatattgattatatcgttattgaatctacaggcatttctgaaccagtacctgtagcgcaaacattctcgtatatcgatgaagcgatgggaatagatctcacttcgatttgtcgtttagatacgatggttacggtcgttgatgcgaatcgatttgttaatgatattcattcagaagatttacttgtggatcgtaatcaaggtgcggatgtgacagatgaacgttcgattgcggatttattaatagaccaagttgaattctgtgatgtacttgtattgaataaaacagatttagttacaaatgaagcgctagataagttagaacatatacttagaacattacaaccagatgcaaaaataattaaaacaacgcagtctcaagtagatattaatgatgtcttagatacaggacgatttgattttgaaaaagctagcaattctgcaggatggattaaggaactaacagaaggcggccatgagacgcatacaccagaaactgaagaatatggtatgaattcgtttgtctattcaagacgattaccgtttcacgcgaaacgtttcaatgattggttagaacaaatgcctcaaaacattgttcgttcaaaagggattgtatggcttgcgcaatataacgaggttgcgtgtttactgtcacaagcaggatcgtcatgtaatatcagcccagttacatattgggttgcatcaatgtctaaagaaaaacgggaagagatacttgctcaacgtcgtgacgtagcggaaagttgggatattgaatatggggatagaaatacacaatttgtcattattggtaccgacttagatcaagaaaaaatagaaaaagaacttgatgaatgcctggtgaatagtagcgaaatgaattctgattggcatcaacttgaagatccttatcgttggaaaataagaaaaccttaagaaataatggatattaaacaagttatgatgataaaaatattgattacaattttcatataaacatcatactacttttcgtaatatagtattgcaagcgcaatctaatactaaaacgaccaaaccttattataattacagtaggtaatcataatggaataaaagtatatatataattctcacaaacaacattatagtattgccttttatactgaaaacgataaaatttaaaatatttgattggtcattttttagttttatacaacaagagattaataaaattaaagaggaaacgacgaaattatcgtcacttcctcttttttttatggcatcattaattgaatacctctaatgatattttttaaaaatagcacaagtgcccatataaagaaaataactgcgatgaggattgcaataatccagccgataccgtgttcactatttacaaaagctggggaaatagatagggttactaatcctaataccaccataacccaactcatgatgtgattgaataacgcatttctagcatgggtcgaagctggtggttgtgcgacgatccatacaataagtggaaataatactggtgcaaagaagacacttaaatagctaatgcctcctaaaatatcactttctctataattttcatttggcatatcatgatcacctcaattctataaaaacatataataaaataaatagtaagtaagacattctaaaattacaacactgtaagttagtataagattgatgttgaaaatagttaattaaatattttgatgaatatagcatataaatgtattaaattgtacaatattaatatattaacttttaaaaggtggatatgatgcgggattttttaaaactgttaggggcattactaacagtgatcattacatttagcatttcaattttatttagtttcttaatacctctaatggtagaaggaaatattttaaacatggggaaattaaatcagccgacatttattatgttgtggattatttttagtgttatattcaatattattattcttattttagctttttcattgattcagtttagtagtgactttgtaaataaaatgaaattaatagcgacgctaaccttttttgtcattattacttatacctgctttagtcatatagatatgcaaggtttaactgatcatttaacattaacgagttctaaacatgcccgagaagtatcaatcaaactattaccatttattttaacgatatcattaggatgttatagcgctattttatcctacttacaacatcaaattgataaagaagaacgtaatatatagtttttgaaagcgttttacatattaatactcatttttttgaaacggtgctaaaataaaggtgagaacagataaagggggagattaaaatgttagcatacaaaaacattttaattgcagttgatggatcagatgaagcagaatgggcctttaataaagccgttgatgtagcaaaacgtaatgatgcaaagctcacaattgtgcatgtgattgatacgagaacatatactgcgtatgaagtgtacgcatctcaatttgacccgtctaaagagtattctgagaagttacttgaaggctataaagaacttgccgttaaagaaggcgtgacaaatgtagaaacacgacttgaatttggcccaccgaaattactcattcctaaaaatttagcaaatgaattagatgttgatttaattatgtgtggtgcttcaggattaaatgcagtcgaacgttttatgattggctcggtatcagaagcgattgtacgtcatgccccatgtgatgtattagttgtacgtactgaagaaattccagaagactttgaatcaaaagtagcaactccagcatttagaagacgatattttgaaagttcagaacataagtaatgatgacttaatatatgacttcattctcacgaagcagtgagaatgaagttttttattctggaataaagcaaatgattatttcagataatatataaaatatggtatcatttttatttaagtgtcgtgttctaaataatagcgcacaatcatttaaaaatctaagtataaaaggagtattatatcaacatgagtcaaatgaaacaactgtttattaaatttattgaaccattgacgaagatagaattttatcaaaatttactagccaatattttaattattgttgcttatatcttattaggtatgattgttattgcaatttctagaaaagtagtaacgaaattttttaaagtcaatgagaagaagaagacacgctataaaattaaaagaagtgagacactttcaacacttgttcaaaacttaattagttatgttgtttggtttattgttcttacatcgattctctctcgttttggaattagcgtctcagctattttagctggggctggtgttgttggtttagcagttggttttggtgcccagactgttgtaaaagatatcattaccggctttttcgttatttttgaaggacaattcgacgtcagcgattatgttcaaattaattcgtcaggtgtaacgattgcagaagggacagtacaaacaataggtttacgatctacacgtattcaatctgatactggagaagtgtataccttacctaatgggacaattagtgaaattgtaaattattctaagacagatgtatcgcctcttattgcaattccgatttctccaaatgaagattatgacgttattgaaaaagaattaaaagcattcttaccaacattaaaagataaatatgatatgttcgttgctacacctgatttactcggtttagatagtattgatggtaatgaaatggtaattaaattattagctcatgttaaaccaggcatgcattttccaggccaacgtttattaagaaaagaaatcataagttactttaacgatgtaggcattcatacgcctaaaccaacacttgtgaaattagaagatgaagaaaaataaacaaatgtttataataataggcttttaaatttttttcataagttttttataataactttttatgactaaaaatttatttaattatcatcatattatgaatgttatattcacgtttaccttaacgatagttttttctatttgtatagcatatatagtaaatcagtggaagtatggtaaatatatcgtgggtggtattggaagaatgaaatatgatactttttataaaagctataaaaataacttggtcgattaataataaaaattttataaataattaaataaatttagattattgaagtctgagacataattagttgtcttgggcttttttaatatattggtagtcgttgactgaattgaaaatacgcttgaatcaaacttttttgatactagttccgagatccattcaggaagaaggtctatgttcaacacaagttagatacgttgttggaatgggaagacgaattcaaaatgaattctatcccacactctttttatttttgattattgacaatttcaatatgaaatgcgattattaaaacgtaataattacgatttaggagagaagaaaatgattaagaaaagtttaatgttagtcttcatcagtattttaacgttgtcacttgtagcttgtggaacatccaatagtggtagtgataaagataaaaaatcagaaaacaatgaaaagcttgaggtaaaaacgacagtatatccactgaaatcttttgctcaacaaattggtggtaaatacgttcatgttgaatcagtctatccgaatggaatggatccacatacatatgagccgagtcaaaaacaaatggtcgatattggtaaatcagatttatttgtatatacaggggataatctagacccagtcgctaaaaaaattgcaaatgcaatgaatgataaaaacaaaacattatcattagaatcatctttaaataaagccgatttgttaaaaggcgaagaggatgaacatgaacacggtgaacacgaagaacatggcgagcacgaagaacatgagcatcatcatggtaaatatgatcctcatgtttggttagatcctgtattaagtcaacaatttgcgaaagatataaaggatgaattagttaaaaaagatgctaaacataaagatgactatgaaaagaattataaaaaattagttagtgatttgaaggatttagataaagatatgaaacgtgctgttaaaggtcaagaaggtaaaacagtatatatttcacatgattctattggttatttagctgatcgctatggttttaagcaagaaggaatcgaaaatatgaatgctgaagaaccaagtcaaaaagatcttacaactattgtaaaacaaattaaagaggataaggtaaactatatcctagctgaagaaaatgtgtcgaataaagttgcagacacggttagaaaagaaacacatgcaaaaacaatttcattttataatatgggttctcatactaaacaacaagataatgacagtaatacgtatcaatcatttatgaagaaaaatattaaagctattgaaaaagctttaaaaaatgaatcttaaaattaaagtatattaaagtaaagaagtaagatatgaagatcaagtaaattctatcttacttcttttttataggcttcctttttcaaaaaaaagtggtatattaaatttaaataatatgtagggcattatttattatttttatgaagtaagggtttatcactaatagattggaaggagacagcgtcatgaatatttatagactacgttaccaacaccataaagacattgtagatgacaatattttaacggtatttgtattggccaaaaatgaagaagatgtaaggaaatttgcgaaaacggtaaattacaaagttgaagatgttaaacatacaacatatgaagcttatgaagaagctaaagcaaaaggtgaaacatatcgccttgaacatgcagatacatatattagctaagtctgtataactaaaaattatataattaaggataaatatcaatgagtataaggttacacttaaaacttctttttgcataaaaaatgaatgtaatcatgcaaagagaagtttttttatatattattatctaacttttttaaaaattctaaagaaattgattttaaaaaaatgtataatatctattatgactttaagagggaaacgaggaaagacaatgaaacagaaacttacatttaaagagaatctctttattgggtcgatgctttttggtttgttctttggagcaggaaacttaatttttccacttcatctagggcaaatggcaggcgcaaacgtattacttgcgaatttaggatttttaattacagcaatcggtttaccatttttaggaattattgcgattggtatttctaagacgaatggtgtatttgcaatttcttcacgcgtaagtaaaatttatgcatacatatttacgattggtctttatcttgttattggacccttctttgctttaccaagacttgcaacaacatcatatgaaattgctttttcaccatttgtttctccaagcagtggaaaatggattttacctgtctttagtatgttgttctttatcgtagcttggttttttgcacgtaaaccctctaaaatcttagactatattggcaagttcttaaatccagtctttttgattttattaggtatcgtggtcgtacttgcattgattcacccaatgggcagtataagtcatgcaccaataagtcctgactacaataagagtgtattattaaaaggttttatcgatgggtataatacattggatgcactggcatcactagcatttggaatcattattgtaacgactattaaaaaattaggtattacaaatcctaatgatattgctaaagaaacagtgaaatcgggggccattagcattattggcatgggtgtcatctatacacttcttgcagtaatgggaacaatgagtcttggagaatttaaagtaagtgaaaatggaggcattgcccttgcacaaattgcccaacattatttaggtgatttcggaattattgttttatcacttattattattgtggcgtgtttaaaaacggcaattggtttaattactgctttttcagaaacatttacagaactatttcctaaaacgaactacattgtattagccactatggttagtgtattggcgtttatatttgcgaatgtcggattaacaaaaattattatgtattcattacccgtattaatgtttatttatccattagccattacactgattttactaaccttagtaagtcatttatttaataattcgtcaattgtgtatcgatttactacattatttacagtgattgctgcattttttgatggtattaaagcgagtccagaaccttttgtgaaaacaaacttcgcgcaatcattaatcggttttgctgagaattatttaccattctttgatatggggatgggatggattgtcccagcattaattggatttattatcggacttattgtttacaaagttcgtggtaacaaacacgaagttcaagcataattaagccatttactataagctataagaagttgaaatcatacgatcttatagcttattttttatatttttaaaggtataaatatatttataaaatgtattaaaatgaagataataatgattttgaggagaaataaagatggactataagatagataaaacatgggcaatcttttataaagaactcgcaaaaaaacttttaaatttccaaaataatcgtgacgacctaatagaaattataaaaaaaatttatgaagttactgatattaaatttccaacattagagcgaaataatgaacttacagatattgatccgttcacggtatttggtctgtttaataaaagttcgatgaaatcatctaataaaattaaaatattagataaaatgaaggaatttttccacattcaagccaaagtaccatatcattttgatagcatacctacaattaacaatatgaatgcaactttttactattttgaaggagaaagagaatttcaagatatagaaaacttgtggtcgttatttgaaattgctttattatattctaataataaagatgaagaaaataaaaataaatttattagaaagtttaaccttgttatggcacaaccaggaattggtaatagtaaattgacaagtgctttatattggattgattctgacacatttgccaatttagattctcgagcgatttggtatatttttgaagaaagcgaaatcagtacaaagtatatcaattttgaggttaacttaaaacaatcattaactgcgaccacgtatttaatgattattgaaaaattaaaattatttttaaaagaggataactatttgaatgattttattgatttaagttatgaagcatggcgcaaatcaaaggaagtcaagcaaagttcaaaagtaaaagatatcgatgcagataaggatttagaagtcgtgaattattggatttattctccaaaaccacaagatgttgattttgcttcttttattgagaatggagaaatgtctattggatataacgagttagaagatttctcgaaatatgcatctaaagaagagattaatcaaaaattacaacaattgaaccataatcagcatcattatattcatacggttaatgccatatgggaatttagtaaagaaatgaaacgtggggatattgtttatgtgaaaaaaggacagactgatattgtaggatggggcgttgtttcatccaatcatcaatataaaaatgataaaaatatcattcagcttgtttggaaggagaaaggaaactggaagattccaatcaaaacattaaataagacgctcactaaaatcacgccatatagtgaaacgattcggaaatttaatgagttgttttcagttgaacattctgatggagtggttgctacacaaacgacttatcccatttatacagcagaacaattcttagacgacgtatttatgaatgaagaagactatgacacgcttgtgcaattaatgagaagaaaaaagaatgtcatcttacaagggccaccaggcgtaggtaaaacgtatgcagcgaaacgattggcttattcaatgataggtgttaaagataaagaacgtgtgaaacttgtacaattccatcaaagctattcatatgaagattttgtgatgggttatcgtcctactgaaactggctttgaattgcgtaccggtgcgttttacaatttttgtaagcaagcagaagaagataatgagaaagaccatttctttattatcgatgaaattaatcgtggcaatttaagtaagatatttggtgagttgtttatgttaattgaaaatgataagaggggaatggaaatagaattactctatgcagatgagaaattctgtgttccagataatgtttatattattggtatgatgaatacagcagatcgaagcttagccatgcttgattatgcactacgacgtcgatttgcattttttgatatgaagcctgcctttgaaaccatacaatttaaacattatcaagaaaatttaaaaaatccacaatttgatgcattaattgatacaattcaagcactgaatgtcgacattcgagatgatgatatgttaggtgaggggttcgttattggccatagttatttcagtaatatggttgatgtcacagagtctgaattatcaaatattattgaattcgaaatgataccattattaaaagaatattggtttgacgacccttcaaaagtggatagttggaaggtacgtttaagggaagcgattcaatgattaacattcataatatttattatatgttgtcttacgcgtttacagttttgaataagaaaggctatcaacatatagcaacagaatcatttaataatgtggcagatttatatagtgcgctcctgattaaaggcgtatcgagtcaattaaaatatggtcttcaacatgactatttagaacacaatgactcgcttaatgtgatacgaggaaagattaatgtcacagcatccatacaacaaggaacaatgatgcataaacagttaaattgcacgtatgatgaattttcaattaatacgtatatgaatcaaattttaaaaacaacaatgcttaatgttctaaaattagatatttcgcgcacacgtaaaaaagcgttaaaacgactgctgatatattttgaacaagtagatatattagattatcgacatattgattggcagttacgatttgatcgtcatcacgaaacatatcgtatgttaatggctatttgttaccttgttacgcaaggacgaattcagtcagaaagaagcggttcaagagaaacgatgatgttcgaagatgaacaacagatggcgcgtttatatgaacggtttgttagggcttattataaaaaggaatttccacagttaaaagtcaccgcgtctcatattccatgggccattgatgatgattatcgtcacatgttaccgacaatgagaagtgatgtcatgctaacttatgggaaaaaatgcttaattattgatacaaagtattatacgtcgacgttacaacagtattttgatacaagaacgattcattctggaaatttatatcaaatatttgcgtatgtaaaaaatgaagcatttcacttaaaatcgaaacagataaatgttgcggggatgttactgtatgcgaaaacggatgaacaacttgtacctgataatacgtttcagatgagtggcaatacgattagtgtcaaaacattggatttaaatcaagattttattcatattgctaaacaactagatgatattgtatataattattttaagatataaaatagttagtagatattgtaaaatttcaacaatccatatacgatatatgcaaattaaaatgacaattttgacttataacaaaggggttaatgacaatgaaacacatgcatttatctgttttagcttatagtacaggtctacatcctgcctcttggagactaccacattcatatgttgaagaagttggagatattgattttcaaattaagttagcgaaattagccgaaaaaggtaaactggatgcattcttcttaggtgatggtcaatatatttctggagaagaaacgggacatatttcttattattttgaaccactaacggcgcttgctgccatttcacgtgaaacacattcaattggtttgataggtaccatttcttcttctttttatgaaccttatcttgcagcacgtatgctttcaagtttacatcaaatatctcatgggcgtattggggcaaatattgtaacatctcaatttgatttagaagcacaaaactactcgatgcaagctttaccacatcttgaaaaacgttatgaacgagcagatgaatttattaatgtaatgaaaaaattatgggaatcatttactgtagaggctatcgttaatcacaaaaactcaggaattggcttaaatcatcagtatattcatccacttcattatcaaggaaagtattttcaagttgccggagctattaacattccaacaccaaaatatggtcgaccacgtttatttcaagcaggaacttctattccaggtcgtgatttagcagtacgacacgtggatgctattttttcaattgcatggaatttacaagatggccaacagttcagacaagacattcatcaacgtgccatggaagaaaatcgtcaaccacctcttgtattaccaggtctcaccgtttatgttgatgagaatgagaaggacgcttataaacttaaacaacaattagatgatatgatcccacttgaaaaacgcaagaaacaattatctaaagccattggtctagatataagtgaatggacactagatgaagttgtgccatcattgccaccttatgatgcattagagaaaaaagttataaaatctgtttatgaagctgtacagcgtgctgttatgaccgaacaccttaccttacgcgatgtattagatcgatttggtacttgggtagggcataaaacgatagtggggacaccggaacaagtagcggatgaaatgattgaatggtttgaaaaagaagcgtgtgatggttttatgttaatgtcaccaacatatccaaacgcatttgaaaaatttattgatttagtcattccagttcttcaagcgcgtggcgtgtttagaaaagaatatgaaagtaatatgttaaaagaccatttaaatataaatacagagaaactataattaagcttctcttttatttaatagatatcatgaaaaaagacttcctccattagggggaagtctaaaatgttctttatattattccattttaactttcgctttgtctgattcttttttatatttttgatacataatccaaagaataattgcccatacgggtataaataatactccaattctagttgaactgttaattaataagataataaagataaatgcgaagaaagctagaatcgcaaatgccatatattttccgccaggcattttgaacttactatctttgtgtaattcaggattacgtttgacataatttagataggcaatcatgataagtgtccaaattaaaatattcaatactgttgaaaatatcgtaatttgaacgaacacttttgttgcatctttaaatactgcatttaaaataactgaaatacttaataagccgcatgtaactaaaatagcatagtgaggtacaccatgtttatttgttttatgcaagaatggtgggccttgtttacgacctgctaaaccgtacattgtacgactatttgcgaaaataccactattacatgatgaagcagctgctgttaaaacgacaaagttaataataccggcagcaaatggaataccaatcaggccgaataattttacgtaaggactgtctgctgggtttagtttatcccaaggtactacagacatgatcactgctaatgagccaatatagaaaattaaaatacgcgcaggtacattgttaattgcttgaggaatcgttttgtgtgggttcttagtttctccagctgtaattccaattaactcaataccaataaatgaaaagatagccatttgaaatgccatcaagaaaccttgaataccattcgggaaaaatccacctctagaccaaaggttcgttacgcttgcttgtccatatgatgttttcattccaagcacaatcatcacaataccaacaatgattaaggctacaattgttatcactttaataattgacagccagaattctaactctccaaatagctttgcactgaataagttcaaagcgactaatactaagatagtaaatgcagctgttagccagtttggtactgtaggataccaataccctacatatttcgctactgcagttacctcagccatacctgagataatccaagttaaccaatacgtccatccgaccataaatccagcaattggtccaatataatgatgggcgatatcgccaaatgatttaaatcctaagtttgataacaatatttcacccattgctctcataaacataaataatacaaaaccgacaataacataagtcaataaaatagacggtccggctaaatgtacagattcacctgatccaaggaacagtcctgtaccaattgcgccaccaatagcgataagttgaatatgtctattactcaactctctttgcagtttatcttctgccataattttcttccctttcatgagtaaccttatgactgaaactttatgactgaatccaataccctttgttataacataaataatttttctaaatttcaaattatttatttgttaaggttaaggataccttatttagttattgttaatcaaataatagtctaatagataaatgttaatacattattaactataattaataatgtattaaattgagtgtttttttaaatctataagcaaattacttctatttattttcaatttatttaataatctaggttacgtaattaaaatatgaaagtagggaaatgaatgaacgattttaacgaaatattggaaagtagaaaatctgtgaaaggatttgatccaaattataaaattccacatgaagaaatgaatgaaatcattagaaaggcaacaaaagcaccttcatcagtgaatatgcagccgtggcgttttgttgttgtagaaagtgatgaagcgaaagcaaaattacgtccattaattcgttttaatacgtcacaaaatgatacatcatcagcgatgattgttattttcggtgatttacaatgttatgaggaaggcgagtttatctataacaaagcggttgaggaaggacatatgcctcaagaagtaaaagaccaaatgttaccttttgtaatggatacttacaaaaatagttcacgtgaagttatgagtgacatcgtaaaagtggatagtagtttagctgcgatgcaattaatgttagttgcaaaacaatatggctatgatacgaaccctatcggtggttttgagcatgacaaaattggcgaagcattcggatatgatttagaacgttacgttccagtgttaatcgttgcgattggtaagaaagaaaaagaacctcatacatcatatagaatgccagttgataaggtagtagattaccaataattaaagtttaatataaaatatcaaaaaatatattttcataaacgattataaaagaaagttctttaaataaaaatttatgggaatatattttttctttaaaatgattaattcttttataaatgggaataactaactgtatcccgtaataaggaaacaatgtacataacaatgtatttacgataccaatctatatctaggagagataagtatggatcaatcaaatgaaaacaaaaaacaacaacaattagatgctctaagaaaaaataatgatggtacagcaatgactacaaatagtggtatgaaagtaagtgaagatgaaaattcactgacagtaggggatagaggtccgactttactagaagacttccacttccgtgaaaaaatgatgcactttgaccatgaacgtattcctgaacgtgtggtacacgcacgtggattcggtgcacatggtgaattccaagtgtatgaagatttaagtgaatatacaagtgctgacttcttaacacaccctgaaaaaacaacacctgtatttgtgcgtttctctactgtacaaggttctaaaggatctccagatacagtacgtgacattcgtggttttgctactaaattctatactgatgaaggtaacttcgatttagtaggtaacaacgcacctgtattctttattcaagatgcaattaaattccctgacttcgtacatgcgttaaaaccagagccacataatgaaatgccacaaggtggttcagcgcacgatacattctgggatttcattggtcaaaaccctgaatctatgcacgcagtattctgggcaatgagtgatagagggattcctaaaaacttccgtcaacaagaaggttttggtgtacacacatttagacttgtaaataaagaaggtcaatcttactttgttaaattccactggaaacctaaacaaggtttagaaagcttagtatgggatgaagcacaaatcttacatggtaaagacattgatttccatcgtaaagatttatatgaatcaattgataaaggcgactatcctgaatgggaattaggcttacaaattatcaaacctgaacaagaatttgactttgattttgatattttagattcaactaaattatggccagaagatcaagtacctgtgaaaattgttggtaaaatgacgttgaaccgtaatgtagataacgtctttgcagaaactgaacaagttgcgttccaccctgcacatattgttccaggtattgatttctctaatgacccattattacaaggtcgtttattctcttacacagatacacaaatttctcgtcttggcggaccaaactttaaccaaattcctattaaccgcccagttgcagacgttcataataatcaacgcgatgcaatgcatcaatcatatattcatcaaggtcaaacagcctaccataaaaatggcttgaacaataatgaccctcatacgacacctaaagaacaaggtggtttcgagcattatcatgaaaaagtagaaggttataaagtacgtcaacgtagtgatagtttcaaagattactatactcaagctaaattatataaaaacagcttaactgaagcagaacaacaacatttagctgatgcattttcatttgaaattggtaaatgtaaatcaacagaagtaaaacaaaatgctgttaatcaaattaataaagttgatcgtaaattagctgaatacgtagcaaataatgtaggtgtagaagttccggcagaaaacgaagaagtgcaatcagatgctaaagatagccaattaacattagaaaaatttgatatcccactaaaaggacactctgtagcagtgcttgtaaatggtgatattagcgctgaaacattaaaatcatatgcagaagtatttgttaacaacgacttaaactatgcatttgttggacaaacagctaaaaaccttaatgatgacgaaattggtattactgaaacttatagcacagcaagttcaacagtatttgatagtgtaatcgttctttcagacggtaaagaaatgttaccgactgcgattgactttgttgaaatgagctataatcataaaaaacctgttgtaatcactgaagaagcgaaaaatgtattacaaagtaatcgtattgatttagatgcgcctggtgttgtagtatctagcgaaccacaagctatccttgacgcattcaaacgttacagatatttcgatagaaaataatgaatgattttttgaaaaagcctgagacataatgtgttgtcttaggcttttttaatatattggcagtcgatgattgaattgaacatgcgtttgttccaaattcttttcaatcaacacaagttggagatacgttactggagtggacgataaattcaaaatgaatgctgtcttgcactcttttgagtaaggaggagatatgatgaatcgaggtattaatcatattggtcttacggttcctagtattgaaaaagccactgctttttttaaacagggactagatggaaaaattgcatatgatagtcaaactaaaaatgatgaaccaagaggtggcgaatatgtcgagcatatcttagggctagaaaaaggaacttcaattattcataaacgcatgatggtgtttggttgtggtcctaatattgaaatgtttgaattccaacacgctcaacaacatgaaccacaatcactacaagatataggttttacacatatttctttttatattgaaagtgacgaatttgaacatgtattagaacgtgtcaaacaggcaggaggagagccactatctgaaccacattctaatacaaaatatgagaatacagagaataataaaaccgtttatattcgagcgccatggggaagcttaatcgaacttcaaactgtacctaatggtttttattatccaaaagatagtgaagcgaaggtatttattcctaaaagtaacgatgagtaataaaatggacgcagtagtgcattacatttttcgacagtgacgattttgtgtacattttctagaaacagggtaataaactagaaagcctatcaaatggcttaatgacagtttaagggagtagaacaaatgattgatattcaaattcaaaaatgtgacttaattgaagtaattgaatcaataatcaatgaaaaagtcgaagttgacaatcaagatgcatgtgaatatttagcgactgaaattgtgaatggattagaaagctacaatagtgaagaaactcaagcaaataatttattaggattgaatagtgcattacgtcatgaagtcaaagcttctaaccactctaaaaagatcacactttcagcaaatgaagaagcattctcgtcaaacgataatgataataatgtagatgtacgttcatctaactagactgaaaaacttacagcactttatgacatcatgttcttacaaatcttacataataaaaagcacttcctaacgagtgaaaatgtcttcatctcattcggaggtgcttttatttatatgaaattagaaaaataatgctttaactattctgaagaaagaaccaagtaattgaaagacatcaccagacattagacaaccacctttccgcaaaaaattatattaagcttcgttagttgaagttagcgcttctgtttgaactaaatcatctgctaaatcataccaaaactgttgtagttcttctcttgaacgttttgtatctgtactgtcttgacctacaaaatcgacatgatcccagtcgtgtttagtaggtgttacttgccaaatacctttttgatttgtatcagttgcttctgtataagcttgattgaaaggatgttgagatgaaatcacagatacaagaccatcattttctctccattctttttcagtagctttaccaatcacatttcctgtcactgtgaatggtaagaacatattatagtctgctttttgttttcctattaaagtcggatgcgttgcctcagctgtatacgttttataaacgatatttggattaagtgatgttttgcggttaagatctgtcgcgccatcacgtgttaaatcataaaaaccattatctttagattgccataatttagagtttttaacgcgtaaaaggtaagagatgtagctttcaccaggttgttgttttagaccccattgagacaaaccgaagtctacacgtgaatttttattacctaatcgtttacctaaatcaaaaaccacttgacgaacaagtgcttcatttcctaattcatctgcagcgtgggtaccattatgcggtgtgcctaatgttgtaattgaagaaaccatattatcgtgtccaccttgtagtaaaggagaaatgtcaccaccatgtgttttttggtattcaatttcttcttgactaccatttcttaataattcttctaattgacgaacagtttgtcctcccatactatgaccaactagatgcactttttgaccaggttgccaatctttataaacgccttcgtatgttttaccatagcgttcatgtccatatctttctgcatgtgcagcaccataatctacagtaccacctttaatatagtaataaagttcaacggcacggtcatagttactaccaaatgcactgatacttgcttcataagcgttataaccattttgttctaaatcttgacgaatgtttaatttatcgccgccccaataatgtgataaaacattaggattgatatcatcagtaaatccattaaaaccatgaacaagaatgattggatcttggtttttgtattgaccttgtttagcaactttattggtttgatcttttgtttctgtcgtaccttgctgttgagatgtattatttgttgttgctactgcattattagctaatgtctctaagccagcctgtgaatttttttgatctttagcatctttatgtccaacagtttcatttgttgtaccgtcaattgagatcgcttcatctttagtgtttaaagtattcactgtaggtgcagcaggatctgtgggttgtttagctgtcactgtttgttttgtttcagttgtgtctacagtatcgtttgtttttccagtagatggtgcctctacgtcattattttttattgcatcctgatttacatttgaatcttgttgagtttttgatggtgttaattctttactctctgttagaggtgttgactgagatgtttttgttgaatgactgtcagttgtttttgaagtattgtcttttgtagatgatgtgttggtttcagcagtcgttgtttgagttgttgttttctcttctatcggactttcatttgtcacgttttctgaagagtgagcttgatttttagtagttgatgtttcagttgtgttatcttttttatctgaggctagtgtgtctttttgaattgtgtttttagtcgattcttgtgtttcaagagaaggttgctcctctttagttgaaactgattcagagtcatcagaagatgtttttgtagttgatgcttcttcagtttcagctactgaatgttttgtagattgatgagttacaatgttgtcagttgttccttcattagtatttaattgatcagtgctatctttaacttgagttgaagctttgttttcattatgtaagcgttgtgcttcattttcattagttactgattgagatgtagaagtagcttgttcgtcagattgaacattgtcttgttgtgtttcttgattatcagattgttttttatgatccccaatagattgtgctacagctgattcaggatttcccacttcctgatgtgtttctgctgcctgtgcagcaccgcctcccataaatagcaatgtcgctactaaaatggatgatgcgcccacactgaatttacgaatactgtatctattttgttttgttttcataaatagcacctctattaattgtttttttgttataaagtatatagattaaataaaaatattaataattgatcgtggtataaaaccgaaaaacttactaaatatcgctttaatatgttccaaagtaatcatcctttcttaaccaacaatttagaaagcgtttacaaatatagtgaaaaattgtcgtatgtagaacggagctacatacgagatttaacaatcaacgttgtcgattgaatttaaatagatggtaacgctatatgaaagcgttgtcaataatctgtcacaattatatagcgtaaatgtacattttaagaatatatgaacttgaaatatgtaataacatcataaattaagggggataaaaacctaataaagtagaccattccttgaaaattattacttgtatgtattcaaatgtaactcggggtttctaggagaacgaggtggcgtaatacgtctaccttttccaagaggcatttggataatagagaatgctaatataaaaagtgaaataaaaaagaaacctaagaatttaatcttaggtttcttagatagcggagggagaaggatttgaaccaacgcgagctaaaagctcctactaaccataaaatggttagcctcttaagccaggcttgagtatccctccaagattttactttaatactatactatatattttgaagtttgtaaagaaaaatattttctatgtaaataatttataaatgtacattaaagttaaaaataaattgttttataaaaaagacgcatactgtcctttgtttgttttataatattgatgtacatattttattttaaacataaaacaaattcatttctaaatggaagaaagtaggggacaaattaatgctaaaatctaaatttggtaaatcattagtagcgagtgtcattattggtgctagtgtactcggatattctgcccaacatcaagaggctaaagctgtagaaaccaactattattatgacggtatacaaagaggatcatatcaagcctatttaaaagcgaaaaaaattagtaacagtagtatttcaattcaacgctatccaaatgcctcgcaaaataatttaaaggcgattggtcgtgtatctaatttaaatggctggaaaaaaggctctcgcgatgcatcagtaagaaaacaggattctatgggaacaggaacagtgattggggctcatacatttgtaacaaatgcacacgtgatcgatgatcaatatggtcgtgcagcggctccgaaatatattaaatttcaaatgaatcgtgatggaagtcgtatgccatatgttttccaagcaacagaagtgattaaagtaccacaatatgatattgcagtggttcacacaaaacaaaatatgtctaaatatgtgaaaccagttaaaattgcaacggattcagagattaaacaattgaaattcaattcgccactttattcattaggatatccatggcaatataacgacaacacaaaagcctattttaataaacttcgtgtaactcaattttcaacaaatggtaccgagattcaaacgaaagatatttttagatcaggcgcttcaggctcgccaatgttaaatagtacatttacaaaaatgtatggcttaagaacatatggatataacttaatgggtggttcaacggatgcttatgctaaacaagaaatgtctggtggcgaatcgtttaaaggatatgctggtcgtttcgtacgtcaacatattaagtaattgatataaaaaaagtacatgctttagataatgaagtgtgtactttttcataacgacatacagagtctgtttaatattgtcagttgaatatatattttttattttaaaaggagcgaaataaatgaagaaacattacttagctatcggcgcaataacggcgacaactttacttgcaggttgtgatttaggagatatgattgggctcaataattctagtgaaaaatcagaacatactacatcacaaagtaaccaaccatcaaataaaaacacttcagataatcataaaaataatacccaacaagatagtaataaaagttcaaatgatagcaatcaacgagagaataaaacaaatagtaatatcgacaacttatctcaagctgaaaaagtagcgttggctttaaatgatccttcagtgtcaaactatgctattactgcaaatgaattaagaaatcattcatattttgcgaattataacggtggcggcgaacaaaaaagtatagatacgtatcaattagaagcattagacaatggagtagagggtgcaccaagtaatatgaaattctatgctactcagcctgctaaaggctcattttctacgcttattggagtaggaggcgatagggttacaattatcgcaacccaaagtccaggcacatacagtcaatttgtaaattcacaaacaggtcatgaattagatctccataccttacttgagaaatacggtgagaattctaattataaggagattgtgaatcaaatcgtttttactaatggaaaaacatatactgattcaaacaatacaactagtgaatcatcttcatctactgaaaaagtaacacgtgcaaatgtcattgataaggtagaagattatgaaggtcatcaattagatactgatacgtacacatataaagaaccagaacaagatgaaaacggagattggggcttctcaattttagataaaaatggagatttagttggctcatatatcgttacttctgacggtgtagtaacaaaatatgatgaacatggagatccaattgattaataaaaagcaacagctgattttaatggtcagctgttgttttctgtgtaagtacgtttaatttcatctaaacgctcaataaaactatcgatatatgattctggagcaataatttttgctagaggagcaagttgataagcaatataataagcatcaaatcgcgtgcaatttacccatgccaaaatggtgtcttcattacgggaaacaatctctttaattgaaaattgttgtttaaattgattccaaatggttgtactcatttcaaataatactgcattattcgcgaagtctttagaaaattttgtatctagaacgtgtaaggatgatatcgatttcaaagaaacagtatgtattttatgttgaaattcgtaagtaaaccaataatcataatgcatatacaaaatagataatggtttaatagttattttgttatgatctacttcaatacgcactctatgtttattgacgatggctttttgaagatccattaatagttttccaggaagtaaatcatcacgtactttgaattgatgtaacatcgtcatcaaaatatgtttatcttctattctgacagacgacagcgcatttaagaaaaatttgtaaatatcgtaatgaagaataggtgtgagactttgtaacttaatgagtaaacttagtacaccaagactttgtttgttcgtagtatcatgtgtgagttcataaccgcctaattgataattatagacgattttagtatgattgcttctccaaaaatgactttcataaaaaaatgtattaattgtattaatatcacgttgaatagattttttgctgacatttgtaaagcgatctaagtcttcttgagtaacaacatgaccatttaataataatgtcaacatattaagtatacgtgttgctttatccaaagatatatctcccttttattaaagtgaaaaagtttttaaaaataattatatagcttgtaatagagtttgttactatataatttgacaaaatattaatagttaaacattgattttaacattaatattgaatggataaagaatggtgagaccgtaataatgcataaactgtatctaacgatggggtagaaaggtgatgtgttctagccttacgataaataaaaccttgaattgcttctacttcaaggggctgatgattcatcacatcataatacatacttgtccccatatgatctggataaccagcatagatatgcataatatctgcaacaatcgtgtcaggcaatgtaataccttctgctatagcgacttgtttaccttcttctaataagcgcgtgcataattgatagacttccgaaatttttaaaatttgtgcagtattgccacctaatgcagtaattgaattaataccaagattgacaagtaatttataccaaatcgttgtttctatgtgatcttctaatataagttctattttagtatattctaaatagcgtttaagttgttcagtccgatgatcatgctgaatatgcaaacgggaatctctgaaatgggtcacttcatcgtcttttttctgtccactaatatagaccacagcttggtagacatgtttaaatggtaaagttgaacgcaaaccatatccattttgagctaagataatagttgtctcatcatgagtaagacggtttaagtctggaactaaagattcaagttgatgcgttttgactgccacaataataacatcgaaggagttagtcatagacttaatatctttaacaatgacatgttgatttgcaggttgaaagtgaatggacttatttgttcttccaagtaatgtgatatgaggtaatacttgttgtaattcgtaggcaatcgtcgtacctacagcgcctggtccaataatcgcaatacgcatttataactttcctttctttaaaatattacatataattatacgtgatattattgagataatgttataggagatcgataaaataatgaaaaatttgtcaaaacttatggaaatgaagcaaaatggtacaaaaatttcaatggttacagcatacgattatcccagtgcaaaacaagcgcaacaagccaatattgatatgattctagttggtgattcgctaggaatgacagttttaggttatgatacaaccactcaagttactttagatgatatgattcatcatggtaaagctgttcgtcgaggcgccgatgatacatttatcgttgtagacttacctatcggagcggtaggcgtaagtgcgaaacatgatttaaatcatgcgataacgttatatcaacaaaccaatgcgaatgcattaaaagcagaaggtgcccatttaactgacttcattaaaaaatcgacacaaattggtattccaattgttgcacatcttggtttaatgccacaaagtgtcggtgttatgggttacaagttacaaggtggtacaaaagacgcagcagaacaacttattcgtgatgcacatgccgttcaagaagcgggtgcagtggcgttagtattagaagctattccaagtgacttagctggattaattagtaaacaattagacattccagttattggtattggggcaggcaaagatacagacggacaagtattggtgtatcacgatatgttgaattatggcgtagaacgctatgctaaattcgtaaaacagtttgcagatttatctgtaggcattgatggtatgaagcaatatgataaagaagtgaaagcgggagcatttcctgcagaagcacatacgtataagaaaaaagtattagatgaggttaataaaaatgacacaagtaattaatactgtaaaagagatgcaaacaatcgcacaacgcataaaagcgtctggtcaatcaataggtttcattccaacaatgggtgcgcttcatgagggacatttaagtatgatgcgacgttcagttgaagaaaatgatgtgacagtcattagtgtatttgtaaatccattacaatttggacctaatgaagattatgatgcatatcctcgccaaattgataaggacgtttctttagttaaagctattcatatcgattatgtattccatccttccgttgaagagatgtatccagatgaattaggcgttacattaaaggtgggacgtctaggggaagtcttagaaggcccacaacgtcctggacattttgatggtgtcgttacagtagtgaataaattatttaatatcgtaactcctaataaagcttattttggtgaaaaagatgcacaacaattagcaattattgagaaaatggtaaaagattttaatcatcctattgaaattgtcggcgtcgatatagtacgtgaagacgatggacttgcgcgtagttctcgtaatgtgtatttgactgatgaagaacgtaaagaagcggttcatttaagtaaaagtttaacattagccaaagacatgtatgaagaaggtgaacgtcgaagtcatatgctcgttggtgcaataaaaacatacttacaagaacatacaagtggtcatatcgatgaagtcgcaatttatagttatcctgaacttgaagttgttaatgaaataaatggtcaaatttttattgctttagctgtcaaattttctaaagcacgtttaatagataatattattttagggagtaaataaagaaaatgattagaacaatgatgaatagtaaaattcatagagcacgtgtcacagaatccaatttaaattatgtaggaagtattacgatcgatgccgatattttagatgcggttgatattcttccaaatgaaaaggttgctatcgtcaataataataacggggcacgttttgaaacatatgtgattgcaggcgaacgtggcagtgggaaaatttgtctaaacggtgctgcctctcgcttagtagaagtcgatgatatagttattattatgacttatgtacagttggacgaacgtgaattaatcgatcatgcacctaaagtcgcgattatgaacgaaaataatgaaataattcaaatgattcatgaaaaagaaaatacaataattaagtaattaagtgagcgtgcagtcttaaagagattattttggaaagactagcacgctttttatataaattttcttaaaccctaaaaatagattgtcattcctgttataataggcgctatgttaaaaaaggagcgttgattatgacagaaacattaaaagacgaatggttaaaaaatcctggtaaaaatataatggcaggtattgttgttgctttagcactaattccagaagctatcgcgttttcaattattgccggtgtagatcctatggtaggattatatgctgctttcattattgctaccgttacagcgattgttggcggacggcctgctatgatttcaggtgcgacagcagcagttgcactggttgtaacaccgctagtcaaggattatggggtgcaatatttatttgcagcaaccattttaatgggattgattcagttattacttggtattttaaaagtaggacgattgttaaaatttattccacgctcagtaatgattggatttgtgaatgcattaggtattatgatttttttatctcaagttgaacatatttttggtatttctattgatacttatatctatgtcacgattacattattaattgtatttatcttacctaaattctttactatagtcccagcgccacttattgcgattgtcgttttaactatactttatctaaccatgggtgctaatattcatacagtaggcgacttaggtaccattaaacaagctttaccacactttactattcctcacgtaccttttaatctagaaacattaaaaattatcttcccttattcgttatctatggcgatagtgggactcgttgaatctctgttgacagctaagattgtagacgattatacaaatacctatagtaacaaaaatagagaggctcgtggacaaggtattgccaatataattacagctttatttggtggaatgggcggttgtgccatgatagggcagtcagggattaacgtaagatcaggtgcgaatagtcgcttatcaactttaacagcgggattatttttaattttcatgattatggtgcttggtcatatagtgatacaaatacctatgccagtgttagcaggtattatggttatggtttctgtaggaactattgattggggttcatttaaatatattaaacatgcacccaaaacagatgtgtttgtaatgattttaacagtggttattgtattatttacacacaatttagcactgggtgttgttataggaattgtatttagcgcattgttctttgcgactaaaatctcgaatattaaagtagagacaagaaaagaaaataatcaatattttattgtttttaaaggacccatcttttttgtgtcaattgatactatgatgacccaaatcgactttaatgttcaacgtgaaacaattcaattagattttagtgacgcgcatatttgggatgactcggctgtagatgctattgaaacaatcgtgcgtaaacttgaagataagcataatgaagtatatgttaaaaatttaaataaagatagtcggaaagtggtttccgagttaagtcaattaaaagaaaaccaacttatttaaaaagaagagtccgggacataaatcctggactcttctttttttgcaatttattattttaatcctacatattcttctaatgttttaccggattgatatactttggttgcagtatcttttcctaaataacgtaaatgccatggttcgtattgataaccagtaattttttcttttcctttaggatatctcacaataaagccgtatttatgggcgtttttcgcaatccattgaccttcttttgtttttccgaaacttgcatataagtttttatctgaattaacgccaccgatgtcaaatgtaagacctgtttgatgttctgagtagccaggacgtgcgctatacttatctgcagcttttttaccatcacgtgcaacgtagcgattgtatagttgtacttgagtaggataacttctgtaaccactcattttgtataattgaatgccatctttttgtgcagcactaaataattgttgtaaagcttgttgggcttttggatcttcaccaggattataatttgaaggaagaccgatatctttgtttacaattaagacaccatcgacatacgtacgaccatttttaatgacttttgtatgtctttgttgattgtcatcacttttattagattgagatgtttgtttagtattattttcatttttaccattattatcattactatgtgagcaagctgaaagtaataaagcgcttgttattaagattgcagagaattttttcatgcttaaactcctttaaattttaattgctataaacaataatgaaacattgtacacagtgtaacatagttttttaattatataagacacaacttttatgaaaaagtggtattttaacaaaatttatatttatcttccccttcaaataatgtataaataatgtatagtatattaataaaatgagaagaatgtatgaggggccaatagatgaaaaaaattttatttttgggtagtatcatgatgatgttattagctgcttgtagtacgcatgaatcttcaaaagaagatcataaatcaaaatcaaatcaaaataacgttcaaaaagctaaaaagaacgaatcagataaaaaagatgaaacgtcatcgaccaatacgtctaaattatccacgaaagaacgattagcattagcattctgtattgatggtgtcgatcaatatacattgactaaaaatgaaattctaactggaatttatgaatatagattacctacgggcaaacataattataaattagttgattttacattagttaaaatgaaacaaccagtaaaacatgcaccaaaacatatgcagttctttacggtttatccagataaaagtacctatcaagcgctaattggagttaataaagatacagtttatgtaggacgtatgcaaaaaggtacattggattataacgatttacttgataaaggaaaagaagctagtttagaagaagtatataaacataataaagataataaagctttaccagaacttataagtaaaatgcatatttcaaacgcgttacctgatagtgctaatgataaagggaatccgttagcttcaaatgatttagaaaaatctggtagtgtcaatacacgttatcgtaacgaagtgtatcaattaatttctgattttgatgaagtagaattaaaaaaatcaggttatttatgggatgatgtgaaaatgacagatcataatgggaattggattgtgaattatcgtaacaaaaaaggtgaaattctaggcacttatagaacaaaacatggaaagattcaaaagttagatgaaaaaggtaacattgtaaaagaagaaaaataaattatcgtttaataaaacgttgtgagaggattaaattaaatcttgtcataacgtttttcttattttagcagtacaatcaaacgctgtatcagttagaaaagtgattaaaggagcaccatggaatattgtgattttttcaattggtatgtatttagtggtctttggattgaagaacgttggtattataagtatgttaggacagatattttcagcaatatccaatcatggactgtgtacaaatatcatgattgtaggtttcatctcggctatattatcttatatgatgaataatttatcgaccgtgctcattaatgcgattgttattcgtcaatcacaagcagcgcatatacttaaagaagatatgatttatgctaatgtgattggatctgatttaggccctaagattacacctattggttctttagcaacactattatggctttatgtcttatcacaaaaggcaattaaaatatcgtggggcatttattttaaaacaggtattgtcataatggttccagtcttatttatgactttattagtattatatattacattacagctcttataaaaaagccaaaaatcaaaagatttatggcttttaatcatttaagtgacgataaaatataatatcaccgcgataactttttctgaataaggcattgacgatcaatatctagcatgatattcgtagggatatcatgaagtatgtcatgtttaatagtaaatattgcatagtcttctttgaaataacagtaagtgatgtcatttaataaattgttataaaaattgtaatcttatcatttacttataaataaggtatgataataaatatattttatattcaaagttcatataaaaaaggatgggatactatggaacaaaagaaagaagggaaatttaaattaaagacgccacatacttatgcaatattaatgtttattattctagttgcttggcttatgacatatattattccagcaggagaatatattagagaaaagaaaaatggacaaacattagtggtgtcaggtacatatcacactatttcgtcagaacacattaattttttaaatatttttagagcaattccagaaggacttataagtggaggcgaaattgtattttatgtatttttagtaggtggtgcatttgggatcgtgcataagacaggtgcatttgaaaatggcgtcaataaagctatgagaacattaggaagagcgaattttttaatgattcctttaactatgacggctttttcaattttaggttttacgattggtttggcagaagaaacgattatttttgttccaattggtattattattgcacgaacattaggatatgatgcgttgacaggagcagctatggtgattttaggggccgcgagtgggtttagtggaggaatgttaaatccatttacagtaggggttgctcaaactgttgcggaacttccgatgttctctggttgggggcttcgtaccatcatatatctccttatactagcaactgctattacaactgtcatggtctatgcaaataaagtcaaacaagataagacgaagagtattgtatatcatttagaacaagaagaaggacttattcaacaagatattgaatatcaacactttagtaaaaaacaagcaggtagtttaatcattattatggccacaataatatttaatgtttttggtatttttaaattcggatggggctttaatgaaatgagtgccaattttttacttgcaggtattttagctggatttgtaggtgggcttggtttcaatggaacatttgatgccttagttgaaggaatgcaaaatattctatttggcgcgatgattgttggatttgcaaaaggaattatcgttttattagagaatggaaaaattattgatactattgttcatggaatgacgacgttactaacagatgtaccctcatctttagtcattatcgcaatgttcatattgcaatttatgcttaacttttttatcccatcaggatcaggtcaagctttaacgactatgccattgatggtgcctatttcagatttacttcacattaatcgacaattgacagtgcttgccttccaatatggtgatgcaatcagtaatattctatttcctacatcagcaattttaatgggagccctagctgtaggtaaaatttcttatacggaatgggtaaagtttgtatggaaacctatattaatatggataatgatatgtagcgttgctatgtctattgctttagctataggttattaaggaaaatatacacctaaggtagactaacgtttgtctgaaggtattgagaagggcgtcttaaaaagatataaaagtaaaggtattaaataatgtctccctttaggatacttgttttaatcattaaagatagtttatagccttagtaaataaaatatataaattgttcttcagtgctactatttatggcagaaaggagtaaagttaaaactttgttcaaaagttcacaaacttttcatggtattttacatacaaagtgctaacataataattgaaagttatattactttaagaggtgtagtaaatgggcacttctaaaaaagtagcacttgttacaggtgcagcacaaggtattggtttcaaaatagcagaacgtttatttaatgacggttttaacgttgctattgtcgattttaatgaagaaggcgcaaaaaaagctgctgaagcactttcaaaagaagatcaagaagcagtcgcatttagagctgacgtatctgaccgtgaaaatgttttcgatgtgacacgtaaagttgtagaacattttggagagttaaatgtagtcgtaaataatgctggtttaggaccaacaacgcctatccatacagtaacacctgaacaatttaatcaagttatcggagtaaatgttggaggcgtattctgaggcattcaagcggctttagaacaatttgaaaaattaggtcatggcggtaaaattataaacgcaacatttcaagcaggtgttgaaggtaatgcgggattatcgttatacagtagtactaaattcgcagttcgtggattaactcaagttgttgcgcgtgatttagctgacaaagatattacagtaaatgcatttgcaccaggtatcgttgaaacacctatgatggaaggtattgctaaaaaattagccaaagaaaataatcaaccagaagaatggggttggaaacaattcactgatcaaatcacattaaaacgtttatctaaaccagaagatgtagctaatgtggttggtttcttagctagcagagattctgattatattactggtcaaactattattgttgatggcggtatgagactccattaatttaaacaaattattattttttaaaactgatatgcaccccaaaagttggacttaaaatctaacttttggggtgcatttttatattcttttagaagacatatctgtatatgatgaaatatttaaccttattgatgttcataatatatcaataataaatggatccatctaaattgtataactcattaaaaatgagtatttagtaaaaaataattaaaagacaatgaacgttttaattttgattgtttatgcatattatacatcatactccttaactttgttttaataaaaatatttagagattcaatcaaaattaaaaatactcttatttagataggatattttatatttaaaaaaataatgatatatagtaaatttaaatgtaaatatagtatataatatgattaatatcttacagaaaggaagacatcaatgagattaagcaatatgaatatagtttctggtatcttatgtatattatcatttctacttgcagtttcgattacatttacagatatgttttggtatttacctggcttttttgtcatgctattgtcagtggtttcaagtgttgtaggtctaatgagtggcagcaaagtatttaatagtatcacgttatttttaacaattattttctttcttattttttcaagtccattattacttgcttagaaaagaaaacgattttatatcatattaatatgaacggcaatctttacagctataatgtgaagattgcttttttaaattaaattaaaaaaacattgaaacgctttcaattaatacgtataatatttactagtttgaaaaaggaaggatattatatgaaagtaaataaatatttgatttttattttgggtgctttaggaggtttgctttacggttatgataacggtattatttccggcgcattactttatattcctaaggatattcctttacataatggtgtgatagaagggttagttgtatcatcaatgcttttcggagcgattgtaggtgcaggtggcagtggacctttatcagatagaattggtcgtcgtcgcttagtactatttatcgcattggtatttattgttggatcacttgttttagcattttcaacaaatattgtcatgcttgttattggtcgtgccattgttggacttgccgtagggggttcaatgtcaacggtacctgtatatcttactgaaatggcccctacagaactacgtggatctttaggttcacttaaccaattaatgattacaattggtattttagctgcatacttagtgaactatgcctttgcagatatgggtgcttggcgctggatgttaggtttagccgtggttccttcattaattttattaattggtgtagcatttatgcctgaaagtccacgttggcttcttgaaaatagaagtgaaaaagcagcgcgtgacgtaatgaaaatcacatataatccagatgcaattgatgctgaaattaaagaaatgaaagaaatagcttctcaatcagaatcaacattctcagtaatcaaatcaccttggttacgtccgacacttattattgggtgtatctttgcgatttttcaacaatttatcggaatcaacgcagttattttctatgccccaacgatttttacaaaagcaggtctaggtggctctgcttcaattatcggtacagtcggtattggtgtggtaaacgtattagtaacgattttggcattatttattgttgaccgtgtcgatcgtaaaaaactcctcgttataggaaacatcggaatgattgcttcattggttattatggcgatgcttatttggtcaatcggtattcaatcatcagcctgggtcattattatttgtttatcattattcatcgtgttctttggaatttcatggggtccagttttatgggtcatgttacctgaattattcccaacgcgtgcaagaggagcagcaacaggtattgcggcattagtattaaactttggtacgttaatcgttgcacaattattcccaattttaaatcatcatttagatacagaatgggtattcttaatttttgctgctattggcgtactagcgatgttctttgtaattaagtatcttccagaaacacgtggtcgcagtttagctgaaattgaacatgagttacgattacgtacaggtgttaaatctgaataacgtatgtatatcgctacttcaatgatttggagtagtgattttttatttttttaaaaaagggtaaacataaaaaaaacaatgctataaacggaggaattaagatgaaacagtcaaaagatttagaacgattacttaaatctttagacggacaaaaatatggcgcttataaacgaacgaaagggatatatcaatttgatcaattccgtctagctatagatcatgtccaagtcgatccctttgccccaccttcaaaaatgcgtgtcattattgggaaacatgagactgaaattcctaatgaattattagacactaaagataaacgtatagtgacttcagactttttaactcgagcagtggagacccagttaaaacatttcaatcgtacagtgaaaggttcaggtaaaaatgggaagatctttatcgatcatccaggacaagaaatactcgaacgtacatctgtagtgattaatgataaagaaattgaaatacgtattgaagttggactaccagcagctggacgtaagattctaggaaaagtagcatcacatacgataatacatggcattcctcaaatggtagaaaaagcgatacaatacgaaaatttaaatcaacaagcattgaacgaacaagtcgcattaaaactagaccagacctatattagacaacaacttgaaacagaacatttagtcgcatttgtggcaaatggttcaatcttgccaagaaaaagtggtgtgtcggacgctctaatgaaaggtgctattcaattcacaagtcctaagaaatttgaacatacattcaaccttccaagtggtcgggcagtcacagggatggctattccacaagggattacacttattgtcggtggaggttaccatggtaaatcgacactattagaagcgcttgagcgtagtgtatatgatcacattcaacatgacggtcgagaatttgtggtgactcaacatgatgcgatgaaaatacgtgctgaggatggtcgaaacgttgaaaatgtcgatattagtccatttattgataatctgccaggaaagaaggatacgacacacttttctacagaaaacgcaagtggtagtacatctcaagccacaaatgtaatcgaagctttagaagcagaaagttcattattattagtcgatgaagatacatcagctaccaattttatgattcgtgatggtcgtatgcaacaactgattgctcctgaaaaagagccaattactccattttctaataaagtaaaatcattatatgaagattataatgtttctactattcttattgtgggtggttcaggagattattttgatgttgctgaccaagtgttaatgatggatgaatatcatttaaaagatgtgacagaagaagcaaaagaaattgcgaatactgacggctataagcgagaaattgatggtgatcagtcattcggagtgctatctcaccgcatcccattaacggattctttctctaaaaaaggaaaagaaaaacgttttaaagcaaaaggattacattctattatgtatggtcatgagcctattaacctaacaggattagaacaacttgtggatgatagtcagacaaacgctattacggtgatgttagattactttagacgtcatggcatcaataatcagaattccataattcaagctacaaatgagatgtatcatttaattgagcatgaagggttagaagcgctctctcactttaatggacatccaggacatcttgccttacctcgtaaacaagaatttatcggtaccttaaatcgatatagaggattgaaagtgaaataatactaaaaaagaagttcttcaagtatataaaatgaagaacttcttttttgaacttaaataatatttttgactatatttccatctaacccaacaattttaatattgttagggtcttttaatatacttatattgtctaaaggattatcatttagaattataaaatctgcttttttattctcttcaatagttccaatttcgttttcatagcctaaacattctgctgcaactttagtggaagctaaaatagattgcataggagtcattccattttcaaccattagttctaattcacgtagattagtaccatgtttgaacactcccgcatctgttcccattgcaattttaactcctgcttctactgcttttctaaagcttttagaatgagccttaattacttctttagatttaataatagaagttttagacattcctaattcttctgcacactcaattactgagacaggcgctaaaagggtgggaactaggaacattcctttttctttcataccagcaatcgcttcatcgtcgagaaaaataccatgttcaatagaatgaatacctgcttctatacaatttttaatgccttgcgtcccttgtgcatgtgccattacttttctattgcctctaaattgtgcttcttgtaccataactttgagttcttcgactgaaaactgagtgaaattaggatggtcagtaggacttgtaactccaccagttgcgtgaacctttataacatctgctcctgctcgtagcatttctctgacttttttccgtacttcttcgacaccatcacaaataccattaggcaaacctggataatcttcaataaaagttggaagtaacattcctgattttgtcattttatcaccatgaccacctgtaattgtgagtgcgttaacactaatttgcattcgtggacctaaaattaatccatcttctactgcttgcttaataccttgatctgctcctaaggcatctctcacagtagtcacaccagcattaattgtacgttttaaatgatcaatagctttataaaaattatatgagaagggacgtgcaaatttttcattaattggccccatttcttcgataatatgaacatgactatctatcataccaggtaaaatatatttattagaaccatcaatgaattatcttcatctatatttaaattgtttttgatttttttaaattttccattctcaattaaaatatcaacattattttgaatttctttacctgtaccatcaattaaatttatatttttaattatcataatatcccaccttagttaaataaaattcattataatacctgtcaagactactgaagctactgtaacagttgtaaatccaccaattagcataggacttaataattctttaaataatgcttctttttcttcatcgtttgtagacactgaacgactcacttcttcacaaagtaagtaatcacctggaaaaccgtataaagcggttaaagctactggtaatgcttttgaatacttccacccaattaattttgcagcaatagaaccacctattaatattcctatagctcccattaacaaaattaatataattgctggaaggtgatgccataaatcttttggtgtaatagcacccattgatccgataacaataagcattatagcgactactaaaatagtaaaagatttatttttttctgcttcagcttgctcaaacaaccctatttttagacctataactccgaatgctaaactaataatcgaataatggatatgcgtataatttcctataacaaaagctaaagatgctaaagtgaacataataaataatcttaataaatcattttttaaaataggatattttttatgtaatgaatttgtgtgttccttttctttaattgaagaattttttgaatactcactttgagaaccggttgaaatataatatttaccatatcttttcatgaaaaatgaactaagtggtaacccaacgacactttgtaaaccttgtattaatgcaggtaaaacaattaaataatttaagtttaattgttttaatttatcaatagtaatcaacaatgcaactaatccaccagcaattggaccaactccagaagctgcagtcctaaaatcaaaaactaaagaaactactactaaaattagtgtggtggatcctagaattccaaataatgaaataataactgctttccactgtttctttaaagtagataaaggcatcatagttcccatgtgcataattgcaggtacaattgctatagctcctaatgagggtagaattgcagttttcaaaattgagttaggtaaaataccagcccattttaataatagaaaactaaccattgctgttaaaagcattggcacacgtgctttagttaatgtagatataatttccccaaaagcaagtaaagcgaataaaatggttgcagaaataagaggttcatgcagcatacatatcacatcccttcaatataaaagtaatattatcacttttagataaatttgttaataaaaaattcagatttttctaaaaatttaaattattatattatctccttaataaaagtctgtttaatagtgaaatataaaactggaatatatactgaaaccgaaaaaataaaagagtggataatatgatatcattagaagtattgattctagcaacaaatgaagtaattaaaacattagattaaacagctatgtagcaaattgaatgcgcacatgaagtatttaaatcttggaagcgctgggacgcatatgaacgtgtagataaattatatataaatcgcacgaactaataatgaaagaatatggaaaatactaaaagaagattaaaaaaataaatatttatcgattggacatatgtaaatcatagactcacttttctttttattaaaggaaagtgagacttttctaattataatagcaaaagtattagggagtgaaacaacaaatttaaaataaattctatctctcaccttcaatattttagaaatatttggatatttatcatttgattaatcgcgcgagattgtttatactgaaatcaatcgcgaacgatagaaaagaggtgctgtgttgaaaaaggatgaaatgacattagcgaatcaattatgtttttcggcatataatgtgagccgcttatttgcacaattttatgaacaacaattaaggccatttggattaacgtattctcaatatttagttttactggctttatgggaagaagataatcgaacattacatgagattggtagacaacttgatttatcaagtaatacgttgacaccacttttaaaaagattagaacaatcaggatgggtcataagagaacgttctgaaactgataaacgtcaactgatggtgacacttactgaaaaagcacatcaacaacaagaagcagtttttgaagcggtagccgaatgtttaccttcaaattttgataaaacgaaatataaccaagcaaaagacgtattagaacaattagaacatggtttgaaacaactcaataaaaaataaagaagaggatgagttaaatgaaaacatacgacgttacatttattggtagtggacatgcagcttggcacgcagctttaacattaaaacatgcaggtaaagaagtagcaattatcgaaaaagagcgtattgcgggaacatgcacaaactggggctgtaatgctaaaatcttacttgaaaatccatttgaagtgttagaagaagcaacacactatcctggtattgttgaatcacaaaatcttaaagtaaattggtcaaacttaatggattataaacataaagtgattgatccaatggctggtcagttaaaatcattatttgaacaacaaggtattgatgtatatgatggtacaggtgtaattaaaaatgaacatacagttgaagtaaatggtgaagcgattgaaactaaaaatatcgtcgttgcgacaggtcaacatagcaataaattacctatcgaaggtaaagaatatacacatgatagccgtgacttcttatcgatggaagacacaccaaaaagtatcacattcattggtggcggaattatcagtatcgaatttgcatctatcatgattaaaactggcgctgacgttcatgtggttcatcatacagatgagattttaccaggatttaaccgtaatcatgtagataaattagttaaaaaattagaagatgaaggcgttaaattctatctaaatgaaaatacagctgcagttaaaaaagaaggagacgcgtttacactaacaactgaatctggattatcaatcaatacagaatatgtacttgatgcaacaggaagagttccaaatgttgaaggtattgggttagaaaatgtcggtatcaattatagtaaaaaaggtattgaagtagatgagtacttaagaacaaatgttaaaaatatttacgcaagcggtgacgttttagataaaacgattcctaaattaacgccaactgcgacgtttgaatcaaactacattgctgcacatattttaggtatggtacaagatgaaattaaatatccagctattccttcggtactttattcgcttccacgtttatcacaaattggtgtaactgtagaagacgcaaaagaaaatgatcaatatacagtaaaacatgtgccattcggtaaacaaatggtattcgaatataagaatgaaacagaagctgaaatgtatattgtactagatgaacataaacacttagtaggtgctgaaatctatgcagatgctgccaatgatttagtaaacttacttgtatttatcattaatcaacgtatgacagcggaagatttaaatcaacttatctttgcattcccaggtgcttcaagtggtgtgattgatttattaaaaatgaacatgttataagaatttaaaaacggttagtccatgtggctaatcgtttttttttataaaagaatgaaatgtttaaatttctctaaaacgtaaataactatattgtacgaaaaatgaaacgtcatctcatttggagggatttatattatgggtaaagaatttgaatcgaatggtgttaacgtagaaataccagatgaattagaatcagtcgttgcgttagaatattcttttgtagaagcattagctaaattagaattgaatgtcacaggtattgctgatgacaaagataaaaataacttagaacattctattaaacacttagtaggtaactatacatctgttggttcacgtttagagcctgatgcagaattgattaaaaaagcagaaccacaattaattctagcagataagacaagacatgaatcaatatttgaaaaattaaatgcggcagcaccaacagtattattagaaagttttgatgctaactacgatcaaagtattgaaacatttaaacaaattgcagaactcgtatctaaagaagataaaggccgtgaacttgttgttcaacacaatgaaaaagttgaagacttaagcaaagatattaaacttgataaagacgtatcaactattgctgctgtaccaacacatgatggcttatatgttcatgcatcacattcatatgttggacaattcttgcaaaaagttggttttaatggttctattcctgaagatatggagaaccacctacctgaatatatgggtgcagattacttaaaagtagatacagaccgatttgcaagcttcaatccagaacgtatattgattatggtagatgaagataacaaagcagattatgaaaaattaaaagaaactgaagattggttaaatattgaagcggttcgtaatcaacgtgtacacgatgtaaaccgtgaacgttgggcgaaatacagaggcttaatcgcatcagaattaatcttagaagacttaacaaatattgaagaataataattgaaaaagcgtgcatttcaaaatagtgaaatgcacgcttttattttaaatataaacatataacatgttgacttatttaaatattatagaagtaactaagagagtcacaccagacagacaaattgaagttatacatatcactatgaaaggtctgagtgcctttgaaataacttcttttaaaacgatattcaatcctagagcaaccatcgccattaacatacataccgttgtaataacatttataatattcataagtaatgaaggaataggaataaatgtattgacacaagccattaagataaagccactgagaaaataaggaatatcgactttttgttgtacttgacttgaatgtgacttataacgcatatacaaaattaagacaatgcttaaagggataagtagaaaaacacgtcccaactttccaattaaagcaagcttcatagcatctggtccacctactccggctgctaagacgacatgagcgatttcatgcaaactcacacctgcccaagcaccataagtcatagcaggtagtctaaaagtagtctcaatcgcggtatagataagagcgaatactgttccaactagagcaataataccgatactcattgcaatatctttttctttagatttaagaataggggccgttgctgcaatagctgcagctccacatacacctgttccgatggcaagtaatatagatatcggcttacttcctttaatcaatgtattaagaattaaagttagacttatagcaaaaagaataacaccgatatcaataagtagtaatttccagcctttacctagaatatcccccatatttaattttaatccatataagataatcgcaaattttaataaacgtttcgatgcaaacgtaatacctggacgaatgtgttctggatatcccatcacttggcgatatagcatcgcaaaaatgatagcaatagctaatgccccaatcgtatgtaaaataggaaatttagctaatatataactgatcattgcgatcataaatgtaaacataatacctttcataaatgaaggctgcgtgattgatttcatagtactttcacctcgatatgaaatcttagcacgttattgttataacgttaaataaataataagtatagtatatatatcaaaaatgttatattagacttaaaggagaatgatgcatggatccgtataaggtattaattgaagtaatcaaaacagaaagttttactagagcagcagaaaatttatatacttcgcagccttctgtgagtcgtgatattaaacgtttagaattaaaatataatattaaaatatttgaatttaaatctccatatttaaaactaactagagatggcgaaaagctattacaatacgcattgcagcgggaaagtattgaacaagaattatggcaaaacttaacatcggaatctgaaatcatctcaggcaccttaacaattggaagcagttatacatatggtgaatatttattatcagaacagcttaccagtcttatgcaacaataccctaagttacatattcatttacgtgttaataattcagattctgttataaatgatattaaacacaacagagtagatataggtattgtagaaaaggaaattcaagacaatgtaataaaatgtaagaaaataatagaagacgaaatggtgtatatttacaaaaagtcgcttcaacctagaatggatatatgtttcgttagagaaaaagggtctggaacaaggttttatcaggaagtaggtctttctgagttgaaattaaatccatatttggtagaaattaataatattaagattatcaaacaaatggtagaggctggaaatgggtttgcgattatttcaaaatcagcaattcatcccgaggattatgaaaaattaatgataacaactttaaatgtgaaacgtcactattaccttgctcaacatattgataaatatattgataaaaatattagagctgtcattgaaatgattatgaagtagagtatataaaaaaaggtggatctttctaaagattgaaaggtccaacttttttattaacactgcggggtgtcttatttattgttttttaattctaagaatttttcagctacagctttaccagattgtggattttgacctgtaatcacatgaccgtcaataacagcgaattgactccagttgtcacctttttcgtaatgtgcaccacgatttttaagttcatcttctgttaaataaggaactttatctgctaagccaactgcttcttcttcagtattagagaaaccagttacagttttaccattaataatagaattaccttcactatctgtgacatttaataggccgatagcaccatggcatacagaagaaactgcaccgttattttcataaattttacgtgttaattcctgtaaatctttattatctttgaagtcccaaattgttccgtgaccacctgcgtaatagataatatcataatcttcagcacgtacggcatctggtgtaagtgtactaccaagacgtgtcatgaagtctttatcttgataatatttccaatctaattcagacatcatatcttcttgtagacttgcaggatcgatagctgtatagccaccttctggactaatataatcgatatcataaccatttttgtataatacatctgcaaagtgaacgacttcacccaaccataatccagttggacgattcatatcaggatattttgaaacgcttgtaactacaactaatgctttactcattgtatacctcctaaattgtttacgtaattcataattacccatttttaaagaggaataacacatactaggtatattttttatatttatgttttttcagtatactccatctttaatgattcactttgatagagtaccatcccagtttttaatttcctaaaacctgctttttcatagaacttcacattgtttgtagtagagattaaatgaacacaggatagagaaccaatttgtgtaagaatatggttaagtatttgaatgccaatatattgagattgaaattctttttttactactaaatcataaattgcagcattgaatacaccatcagagagtgctcttgcaaaaccaattattttatcattgtaagaagcaagtgtcacaaaagtactattgttaaaaatttcgttaatattattcttattatgattagcccatccaaccgaattataaatttggtagatatcgtttagatatttttcattatattcactatataattctatattcataagatcatctcacaattatttattttgattcaattatatacaaattttacaaaaattgtttaaaaaagttaaatggtggtacatactagtatacaatttaccaattctatgaattcgtaaaagtaccctcactaatccatcgattagtgaggttttttgtattccaataatagataaattatacttgtagtaatctttaagtataaaaaggagagataataatggcccaagatagtggaaaattaaattggtcaagtttaatcattggtacactattactgattattgctgtggttatatttagtaatccagttcaaaacttctatacactgacttggctgattggcttactcattatgataggcggtgtcattcaacttttattccgtcgtacggcaaaaaaactcgtaggagtaaatacaaaattaattttaattaatggtattatcgatttaatctttggtattcttgttgtatttaatgttggagcaagttcagtattctttgtatttatgtttgcgttttggtttattttcagttcggttatcggtctgtttacactatcacaacaacatcaattacgtggtttatcaattatcgtaaatatcctagggattattttagggatgatcttattatttaatccaatgatgggtatgatttttgtttcaaccttaatcgcatttacattcgcagtcctaggtgtgacatacgttattgagggtctagcataatatatgtattcaaacatattaaattttaaactcttcactgatgtaaaagtgaggagtttttcgcttaaaaagcgtgtctactgcgttgaatgaaaagtaaagttgatatacagaatataacgtaagtattagaatgataattgataaaacacatgaacatgtttaggaggaactatcgtgaattacaattttgatgaaatcattgatcgtcgttatacaaattcaatgaatgtggaaggctacaaaggttatctttttggtaatgcagatacgtcagatttaaaagataatgatgaattgattcgtatgtgggtagcagatatggactttggtacaccagaagtcgtattaaatgcgattcgtgaacgtttaaataagaaaattttaggttacacaaacgtcttcggttctgaatattatgaagcttttgtatcttggacaaagaaacgttatggtttcacttttcctcaagagcacctcgtattctctcacggtattgtggctgggttaattgaacttgtaggttatatttgtgataaggatgataaagcattaattgttacgccgagttatggaccatttaaaatggcatgtgataaaaatcatatttcaacagtatattctccactaatcaatcatcatggatattatgagattgattttgaggatgtacgtaaaaaagtagaaacagaaaatattaaattatgcatttttgcgaatccacataatccaacgggacgtgtctggtcagaagaagagttatccacattaggtcaaattatgaaagagaatgatgtatggctcatttcagatgaaatccattgtgatatcaaacgttcaggtcaatcacataccccatttgccaaagctgtccctgattacgacaaaatcattacaactatgtctcaaagtaaagctttcaacattgcaggtttgatgttttcaaatatcattattcaaaatgaatcgcttctaaaaacttggaatacacatcactttggtacggaaaatcctctaagtgtggttgccacgcaagctgcttatgaaaaaggcgaagattggttacaagcaatgaatcattatttagacgataactttaactatttagcagatttcctagaaaaagaactaccacatgcagagtttaaaattccagaggcaacgtatttagcttgggtagatttaagctattatattaaagaaaaagatattgatgaatcaatggcgaaattctttattaaaaacgctggtgttatcattgaaggcgcagagcaatttgttcataacgcagagggtcatattagaattaatattgcagttcctagagaagtgatgaaaaagggactacagaaaataaaagcggctttagtttaaataggagggacatatcatggctattattgaaccctcacacataggtcatacaccatttcaacaattattaggtcatcacgaagacattatgaagacgtggtcagcattgagtgacacactagaaaatactagcgcgttaaacgcagaacttaaagaagagatacgccgtatgctagctcagaaaaatggttgccaatattgtaaagcaaaaggcaagcctaccgggagtctaacagatgaaaaatcagcaatatgtataggatttacagaagtctatatcaaattgggagatcaaatacctacaacgtacacagaggtcttaacgtctcatttatcagataaagaaattgtcgaacttattacgttcatcacatttacaaatgcccaacaacaatttggtgcgatgatgaaattagaaccttaaataaaaggactctagcttaggttagagtcctttaataattttcatttaaaataacattccccaaatcgtctgcaaagtatggttttcgataataataaataaaccaagtccaatatagaccactgccatgatccaacgactgaacttctctacagtttctccgatttcaggaatagatgcaagcttctgtgcagtaaacactaagacatagattaaaactaaaaagacgattagtgtcacaatgagttcagagacgcttaatgtgacaaagtaagggacaaataatccaatgttatctgctccgcaactcgcgatcgtcactaacgccaccgtgccaattagtttagttaatccgtgtttgtctagttcttgtttcgctcttttttctccttcacaatcatcaaaaatagctacttttaatcctaaatagataggaataagaccaagtaatcctaaaatccatttttcaggcacataatttaagacaaaggcaaagaataaacttacgacaatcaatgtcacagatcctacatattgaccaatataaatatttctatattctttttttgtctgtgctcgcgcgaaaaaaataagcaaaataacaagtaagtcgactgcagttgcgatatacaatatcgcagcagtaatgatagtttgaatcatagtttaactgtccttttaaaagtgatattgaataaagtataacgtatttcaaataagaattatatagattttattttaaaattttcaccaaatttttaatgtctacttgcatggaaaaaataaaaaaaataaatactaaataatttgaaaattcaaaatataaagtgtaaaatgaaaatgaagagattagaaagcgcttacaaaaatctctttatattaaaaataataaaagttctcttatggaaggaggcgttcattcatgagtgaatcatatgatttgattgtgattggtgcaggacctggaggctatgtagcagccattcgtgccgcgcaattaggtaaaaaggtggcagtcattgaaaaattcaatgctggaggcacttgtttaaatgtgggttgcattccatctaaaacattattagaacacggggaaaaagcacatagcattcaagttgctaatgactggggaatgacgacgaaagaattaaatatcgattttcctaaatttgtacaacgtaaaaagaaagtcgtacaaacacttacgggtggcgttaaacagttactaaagaaaaataaagtagcttatattgagggagaagcaagcatttcaaaagacctaaacgtaaaagtaaataatgaaacgtatcaaggtaaagatattattttagcgacaggtagtaaaccatttgtaccacctattgaaggattagataacgtcgattatgaaacaacagatacatttttcgatttaaaacaactacctaaacagttagcagtgattggcggtggtgtcatcgcaacagaactcgcttcatcaatggctgatcttggcgtgaacgtaaccattgttgaagtggcagatgatattttacttactgaaattgatgatacacgtgagttattaaaagctcatttagaaaatcaaggcattaacattattacaaaggcgaaaattaaaacagtagataaaactaaaattgtactcgatggtcaagatgacgtcagcttcgacacgttacttgtcgcgacaggtagacaaccgaatacacaagtggctaaagatttaaatttagagatggatggcaaattctttaaagtggatgaccattatcaaacaagtcaaaaacatgtctatgcgattggcgatttagtcaaaggttatcaacttgcacatgctgcaagtgcacatggtattcatgtagcagaaacacttgctggagaacacccaccacttgttcgtcaagagaacattacacgttgtatttatacacgacttgaagcggcatccattggcttatcagaagagcaagccaaagaagcgggatatgatgtgaaagtcacacaatcagcgtttcaaggtaatgcgaaggcgctcattaaaggggaaaatgaaggaattataaaattagttattgatcaaacatatggggaaatactcggcgcctttattgtaggacctcatgcgacagacttaattggcgaagtcctaggagtaaaagcgtcagaaggtaccatctatgaattatccgaaataattcaaccacatccagcattattagaagcgattggcgaaggtgcggatgcatactttggttctgcaattcacatgtagttattacacttacgccctatgaaagataggaggaattgacaatgaaaatggaaaaagaacaagcacgttggatttataaaacaatgaatgaaattcgattttttgaagagaaggtacacaaaatttttagtgatggtcaaatcccaggatttgtacatttatatgtcggtgaagaagccgttgccacaggtgtcatgtcacaactgactgacgatgattatattacaagtacacaccgtggtcatggacatgctatcgcaaaagggtgtgatttaaacggtatgatggcagaaatcatgggtaaacgtgatggtttaggacacggtaaaggtggctcaatgcacgtagccgaaattgacaaagggatgcttggtgcgaacggtatcgtaggcggaggctttggtcttgcgattggtgcaagtatttcaattatcaatcaaggtaaagacaatgttgccgtatgcttctttggtgatggtgccgcaaatgaaggcacattccacgaaggtttaaacttcgcttcaattttaaacttaccagttatctttgtttgtgaaaataaccaattcgctgaaggtacgacacacgactatgcaagtgcatctgaaacgattgctgaacgtgctgcagcttataatatgccaggcgtacgtgtagatggcatggatgtcttagaggtttataaagcaacacaagaagcagtagaccgcgctaaaaaaggggaagggcctacattaatcgaatgtgatacgtatcgtaaatatggtcactttgaaggtgacgaacaaaaagttaaatcaccagatgatcgtaatgcagataaaaatgccactgtagaattcagaaaacaagcgattgaagaaggttggttaactgaagaagaagcagatgatattgaaaacacagctgaacaagccgtagaagatgctgtgaaatttgcggacgaaagtgaattaccagatgaagattcactatacaaagatgtttttgcataacaaacctttaaagcactaaaacaagaaatagataagaacgaacctaaccagacgaggaggtttttacgatgagtgaagaacgtaaattaacatttatgggcgcgattaatgaagcgattgatcaatctatggagaaagatgaaaatgtcatcttaattggtacagacgtttcaggtggcgcaaaagtagaacatattcaagacgacgatacatttggtggcgtattcggtgttacaaaaggactggctaaaaaatatagtcgtaaacgagtgattgatacacctatttctgaacatattacattaagtgcagctgtaggatcagcagctaccggattacgtccaatcgcagaactcatgtttaacgattttattggctttggtttagacccaattttaaaccaaggtgcaaaaatgagatatatgtttggtggtaaagctaaaattccattagtggtacgtaccgttcatggcgctggcgcaagtgcggcagcacaacactctcaatctctatataatatgttcgcaacaattccaggtgttaaagtagttgtaccatcaaatccatatgatgcaaaaggattattaatgtcagcgattcaagacgataacttagttgtattttcagaagataaaacattacttggtcaaaaaagtaatgtccctgaagaaccttatacgattgagattggtaaagccaatgttacacgagaaggtgatgatttaactattgtcgcaattggtaaaatggttgcagtggctgaagaaacagctgaccgacttgaagaagataacgtttcagtagaagtcattgatttacgttcagtgtctccatgggatcaagatacagtgttagaatcagtgaaaaaaacaggtcgcttaattgttattgatgaatcaagtccacaatgtaacattgctggtgacgtcgcttctgtcattggtgatattggattcgattatttagacggtccaatcaaaaaagtaacagcaccagatacaccagtaccatttgcatcaaacttagaagcggcatatattccaaatgcagataaagtattagacgtagcatctgaattagttgatgacttaaaaaaggctaacgcgtagggaggtgtatcacaatgagtgaaaatattattatgccaaagcttggtatgacaatgaaagaaggtactgtagaagagtggtttaaatcagaaggcgatacagtagaagaaggcgaaagcattgtcacaattagctctgaaaaattaacaaacgatgtcgaagcacctacaagtggaacattactaaaaatcaaagtacaagcaggcgaagatgcaaaagtaaaagcagtgcttggtatcatcggagaagaaggcgaagacgtaggaagcgatgacgatgattctgaagaaactacccaagagaataaagataacgacacaacttctgaagatcaacaagcttcttcaaatgaagaacaatctgataaaaaagatacagaaaaagaagcgaagcctgaacaacgtgaccgtatctttatttctccgttagcacgtaatatggctgaagataaggaacttgatatcacaagaatcaaaggtacaggtggaaatgatcgtattacaaaattagatattcaacgtgtagactcagaaggttatgattacgaaggtgaagcgggtacgtctaacgaaagcgcatcttcaacggcacaaaacgtcgatgtgtctagtattggtgaaggtctaaatccaatgcgtcaacgtattgctcaaaatatgcgtcaaagtcttaataatactgctcaattaacattacatcgcaaagtcaacgcagatcgcttattagactttaaagctcgattatctgaagaattaaaagatgcagatcaagatgtaaaattgacagtcacagctttattagctaaagcagtagtcctagcacttaaagaatatggcgcaatgaacgctcgttatgaaaacggtgaattaacagaatacgaagatgtacatttaggtattgcgacatcacttgaagatggtcttatggtgccagtcattgacaatgcagatactaaaagtattggcactttagcaaaagaaattaaaacatcagctgaagcagtacgtgagggaaatacaagtgacgttcaacttagtggcgctacatttacaattacgaatatgggtgcaagtggtatcgaatacttcacaccaattttaaatttaggtgaaacaggtatcttaggtgtcggtgctctagctaaagaacttgttcttgaaggagataatgtaaaacaaatctctcgtatcccattaagtttaacattcgatcatcaaatcttagatggcgcaggcgcagctgatttcttaaaagtacttgctaaatatattgaaaatccatatttattgatgttatagataataaataactttttatcatgaagacccccaggagtctaaagtacttctggggctttatttatactcaactatcttacattataagttagttgacggagctattattttatactatcttatattataagatagttagtaaaaggtgatcacatgacaatatctaatcaaataatgaaaggacttttagatggagcaattttaggtcttattgcaaaaggagaaacgtatggatatgaaattcttgagaaattaaaggaacatcaatttcctgaaattagtgatggcagtatttatccagtgctcttaagactagataaaaaaggttatgtacatacaaccatgcgtaaatcggataatggtggacctaatcgtaagtactataccatttcagaaagtggactcaaagaattacagcaatataaagaaaagtggcaagcgctcaataaaggtatgaaccatatattcaggagtgataatgatgataagtaaagaaaaagaagactacttatttaagttaaaggctgaactcttatttagaggtaaagatgaacatgaggttaatgatattatagaagagttaagagatcatttcgaacttgccgaaaagaatcatgatgatgttagtgatattctaaatactccagtaaaagattatgctgatcagttctcagaatatataattttaactaggggattatttaaatacttagctttattttcagcatttatgctagctatttttattatcccaaacttttttacagaacaacttaatgtaacaattggttttattattaatattttatttatcttttgtataactacgattttaccttttttcttaattagaaagggtctcgtaaagtatggagagcaacgacgaatatatatttatgcttttatatggggagcagttatttttggtttcatcctattaagtacgtaccttacaaaacactatcccatttattatatcattacactaactgaatcaaaaagtgtgatcataggactgattctgttgttaattgtaatgattttatgttttgttttgaaacagcgtttgttcgctttagtgatatttattgtttgtttgccagatataattggatgggtagttaaaatgtacagtcgctcagaatctcaatctattattgtttcactgatcgtagccattgcgttattgttaatattgaatattgcgtttttcatctctacatttaaaaaacgtaaaaataaagtgaaggagtgattcattatgtcagaaaatcaaaatcaaggttgtataaaatgtggtcatacagaaatagaagaaggaacgttatcagcaacaggatcaggattgtctaaatttttagatgtacaacataataattttaagacgataacttgtaaaaattgtggatataccgaattttataaacaagatagaaacagaagtagagattttattgatttgttctttggaggataggtcaaaagaatagaacaacagtaacccttgtggttgctgttttttaatctttaggtaagacttcgggttgtgtgaagttagacttttaggtgtctaaaagttgtaaaactatttgatatattgacttgatatttatgggattttaagtcattgtataagtgtaggttaagtaacctataatttaataatctctgctaggggtgctttatattgctgaaaggaacatcatgttccaaccctttgaacctgatctagttaatactagcgtagggaagccagtgagtcactttacaataacatatggatgttttcataaattgatgaaaaggtcaatttaactattaatcattttcttcattatgatgcttacatatattttcgtatatattcacttattcttatgcattcagtattaagctgaatgctttttttatgaatcatataatcagtgatatttagacccttctagtatttaggaggcaatgtcaatggagcaagaaaaaatcaattttaaaagaacttttccagcaagtaaacgtatttttaaaaaaggtgagggtaaggatagtgatatctttgtaccatttcgagaaattgaactttctgacacccaattagaacaacgtagctttcaaaatgaacctgttgtagtgtacgatacagcaggtccttatcatgatgacagttatgaggttgatatcaatcacggacttccaaaggttcgtgatgcatggattgaagcacgtgaagacgttgaacattatgaaggtcgccgtattcaatcgattgataatggtttttcaaaagaaggccataaaaactatgtagctcatccatttgaatatcaaccaagacgtagcagtaaagagacacctgtgacacaaatgtactacgctaaacaagggattatcactaaagaaatgaaatttgtagcaattagagaacaagtggaaccagaatttgtaaggaaagaaattgcgagaggacgcgcgattatccctaataatatcaatcaccctgaatctgaaccaatgattattggtaaaaacttctctgtaaaaatcaacgcgaacattggtaactctattgtgtcttcatctattgaagcagaaattgaaaaattagtttgggccacacattggggtgcagatacgatgatggatttatctacaggaaaaaatatccatacaactcgtgagtatctcttacgtaactcacctgtaccagtaggaacagtgcccatctatcaagcgttagaaaaagtaaatggggtagcagaagatttaacatgggaagcgtatagagatacattaattgaacaagctgaacaaggggtcgattattttactattcacgcaggattacgtcttcactatattccattaactgttgatcgtttaactgggattgtttctcgtggtggctcaattattgcacaatggtgtcttgcacatcacgaagaaagctttttatatacacacttcgatgagatttgtgaaatcttaagtaaatatgatgttgctatttctctaggagatgggttgcgtcctggttcaatttatgacgctaacgatgaaagtcaatttgcggagttgaaaacgttaggtgagttaacggatattgcttggaaacataatgtgcaagttatgattgaaggtccagggcatattccaatgcataaaattaaagaaaaccaagatttagcagatttctattgtaaagaagcaccattttatacattaggacctcttgtaacagacatcgcaccagcatatgaccatattacgtctgccattggtgctgctcaaattgcgagccatggtacggcaatgttatgttacgtgacacctaaagaacatttaggtttaccaaataaagatgacgtacgtgaaggtgtcgtcacttataaaattgctgcacatgcagcagatttatctaaaggcttaccaggggcaacagaacgcgacgatgcaattagtaaagcacgctttgagtttcgttggattgatcaattcaaccttgcattagatcctgatcgagcaagagaatttcacgatgaaacattacccgcagaatcagcgaaaattgcacatttctgtagtatgtgcggaccaaaattctgttcaatgcgcttatcacatgatattcgcgattcctacaaagaacagcttgaaggcatgaaagagaaagccgaagaatttagagaaggcggcaatagaatatatcattaatgataatggtaaagaggtagcgatataaaatggctacctttttttaaaaaattcttctagatatacccatttcgtctaactactgatacgatagtgttatacatatttccagggtaatattgctaggagggtttagcatggataatcatgcagaatttaaaaaaggaattttatttgcgttaggggcgcatttattatgggggatcctccctatttattggagattcattcacggtattagcgcatttgaaattttagcgtatcgcattatccttgcgatggtttttatgattctaatgatttttgtattaaaaaaattacaagtgcttaaacatgatatcaatcaactcatagcacatccgattcaactggttgcgattatcattgccggttatgtcatcacgattaactggggaacgttcatttgggcagtgtctaatggtcatgtgctacaaactagtttaggttattacattaatccattggtgagtgtcttactcgcatttattttcttaaaagagcgtttcaataaatttgaaacgttagcaattgtatcagccgcaattggcgtcatttacatgacaatgaagataggagaatttccaattatttctttaatgttggcattctcatttgggatttatggtttactaaaaaaattggtacgtgttgaagcgatgagtgggattgcgattgaatgtattgtgacagcaccagcaggactgatttatatcatttatttatggcaagcacaccaatcatcagtcggtttgaatataagtacatttttactcttattctctggagcggtgacagctgtaccacttattttattctcagcgggtgcgcgtcgcattccactatcactgacaggatttattcaatacgtcagtccaacgattatctttttactagggatcttcgtatttaaagaaacattcgatatccaccaattcattacatttatctttatttggattggtattgcgctttatagtatctctcaatatattaaaatgaaacgtagtcctagaccagaataaaaaaaagcatccctttactatcttgtatagcaaagggatactttatttatcatataaaaattgatttaaattatcctaatgatccattagcgccagcactttcttcctcagcgctatttatatttttccatagaacacctaagaatactgcagcgattgctacaacacctacatattctacaattttacgtccaggtgatttatatccagccataatatgacctccatttataatttttacgtaatgaattcgcatattaaggtattcccgtttttaaatttaaaaaacatttccactgttaattttgataaaggtattgtggagtgaacaagatacatagctacaccaatcaatgatcttcattatagaccctacctcatttgaatctaaaaagcctacacatttttatgctacatagtttttaatttttttattatttacatttctagcaattgatatcatgtcctggtgctttttaacgtttcataggaagactactgatatagacagaagtaccgttaatagaatgaagcagaagtatgacaaataaacatagacattatctattaagtttcttcgcaaagtaagcaaaataactcatcattatagcgaaaatgacggatgaaatgaaacaacgcacaatacctaaatctaattttaatagtcgttgtgctaagtaaaagattataaaataaacgataaaaaaatataggaaataacgtattgttttcattagtaatctccttatcaattaaaatatgtatgatttaaggctaacatgtattaaatataaattaaaaataatgaaagaataaaaaagcagagtaatattataagtattatataattaattagtcttttaattaattatttttaaataaaattatattttaatttataaaaattttgaatttatgagtgtaatattatatattaaaggtggaagttcattataattctataagaggagtgatccataatgaagaaatttgcaaaagcaatggtcgttggtggtattactttaggaacagtattagggtttaatgtaactgagcataacggtgtatcaaatgaagcacatgcacaaacacaaacgtcacaaggttatcattatcattatcaaggttatacaaaatcaggtggcgaattcgtattaaatcacacgttctataatgcgttaaaagctggaaatgtgacatttaacggaattaaagtgaataatcagtatcaaaacggtacatcaacaaaaaaagtatacgaccaaacatttaatcaggtcaaaggtaacacagcagcaatggttgattttaaggtcgcacctaaaacagtaagcttagaacaagtgaaagacgtttatggagctcattatcaatatcaaccatcactaactaagaaacaaacagatgaaacaaatggattatacggttacacagtaggtaaaggtcatattacattccatgttacggatggctacgtggatcatgttactgtgtcataatagaagatataaaagagcagcacctcattgtgaggtgctgtttttttgttaatcgagtgtattgattaatgtcataatgaaagtcaatatacaagcaatgataatgactaactttcctttttctgttttctcatgtccatgttggtattctcgtaaaacaaataaccatgaaatgataactagcaatcctaaaacaatactaataaatttcatgtaatgatctccttgtacatctagaattcttgtttcaaacataacgtgatttaaaataacaatcaactatcattttcgtgcaattacaataatgataaaaggcattacgattatttattatagctgaaattttaaaagtatatttagaaagctacgtatataatttgttaaaattataatttaaacatacctaagacacttatttatattctaaatttttacatatgagaataaaatataatgatacaaatagttttagaaatagattaatataaaatgttaaccttaatatatggataaaaaatattattaaaggaggatattcatgaaagattctatcttttggaagaaatcatttattcctgtgtatttcatcgtggctttcttattgtttattctttttaaattttacatacagactgataacttttctatatacatactcatttttattgtactcggctttggaatagcgtctgtgatttataattctaaaagtaaatattggaaatgataaataaagagatcatctaagaagttaagtatcttagaaggttgggatattttaatgatgaaaaagtattaagtatagcattaattagtactatattattaagtgcatggtcgataaacattagttgatgaaaatcgagaggataagaaacagacacaagaatcacataataataaaaaccataatcaaaatactctgcgaaagggatatttaaaattatgtttgtgataacgttttgttggaaaaggaagattaattttgaaatttgttttatatttcgtatatttctttgtttctttttttattttaaatttgctacttgatttagtgatacccctccttgattttgatgtatatccaagtcttatttctgcattgttttttgcaatatttatgactttatttacttatgttttaaaaggaaataaaagtaaaaaataaaatgcacatttatgacaagaagatttgttttgtgttgagaagaacccttaactaaacttgcaaacgaatgttggcatagcgtgacctattaagtcgaccattcgacaagttttgggtttgttatgggttcggagattcaacgtcaatagagcaattggaataaagtaaaaattttgaaataatataaatatcaagaggtgatttattattcaaaataacagaattgatattaataagctcagtacatttcatcgtatttcgtttgttatgaatattttctttttaatttttatggctccaatttatagtctggataatgtctacttatcagttgcttggactattttgggtttaataaatggtgtttatttattagttaaacaaagacatggaaatactaataatcgtatgtgatgtactgataaaaagagcctaaacacaggctcttttttattttgatcatttttcacataaaacgttttgatttttagcccaactttttagatttgttacgccattaagattttttgaatttgtgtgtattgttatattttcgtttttgtcgatttctctttcacaatgactgcattttaatttttcaaaaaacataaaatgacctcactttttgcgattttgtattcttttgtttgtatttaattcattaaatttgaaagcatatcagctacatatgtttcagtaaatgctgctaatataaccaatggtaaacagacgaataaatatgcttttaataaattaaataaacttgttttgaaagagtagttttgctttttttcttttctgaatagattggttatttttcttataattgatttatttagcatataaagaccactaataaatatacaaaaactcataatttctaaagtgtaatggggtatataagcgattaagttagttagacctttgtaagtgtcaaaatgtatgaaaaaaccaaatagtattccaggaataataagcgatactatcaggtttaaagtatataaaaatggtatgggtattaatgctaacaaaaacatttgtattggaacatgaaagccattattttgtataaatccccaaactttttttagaccttgtgttttactaacgctttcaggtgaattggatcctaattgttttataaattcttctgaaggatgaaaaaataaagcgattggaattgtcattagtagtagaattgttgatagtataaagaaatttaatgctcttttaaaataattttggtctttaatatttagcataattaaccctttcttttttgttttttgaaacgagtatcatgagtttcttcctgtccagataattaataactttataatagaaagtactatatattgaagtgtattttatttaaaagttctataaacatttaaagtactgacatctatcttttaatatttgatataactcatttttacatagctcctgtttttaaacaatactgacaaatgagtcatattttaaattttataattctatttatatcaatatgttcgtagatgacaaaaatttcagtattaacaaatattaacgctattgatataaatatagtgtaattgaattttgaaaacatttttatattactcgttgatattgtaaatgtatgaaaacaagaacagccacagtttcctaattatgcctctggaagctatggacctaaagaaagtgaaaaaattacttagtgaagacggattgaattggtggaataatttgtaatataaaagacttaaagttgtcgtcttttgaatgagtagttaatcattgattaatatgcaataatcaatgttgtaaagattataaagggaggatacttaatggattttattaatattacaggtgcttcacaaaataacttgaaaaacatagatgtaaatatcccaaaacacttagtaaccgtatttacaggacgttctggttcagggaaatcatctttagtgtttaatactattgctgcggaatctgaacagctactaaatgaaagttattccagttatatccaatttcatttaaatcaacaacccagaccgaaagtaaaaaaaattaaaaatcttcctgtagcaatgacgattaatcagaaaagattcaatggaaattctcgctctacggtaggaacagtttcggatatatatgcctccgttagattactgtggtctagaataggcgaaccgtttgttggctattcagatgcatattccttcaatagtcctaagggcatgtgtaaaacttgtgaaggattaggatatattgaagacattaacttagatgaattgctagattgggataagtctttaaatgaaggtgccatagactttccttcttttggaccagataaagagcgtggtaaagcctatcgagatagtggtttatttgataataataaaaaattaaaagactatacaaaagatgaattagaattatttttatatcaagagccaatgacgttaaaaaatcctcctaaagaatggagaaagtcagctaaatatgtaggtctaatacctagattcagtagaatatttttaggcgataaagaatttaataagaaacgctacgccaaacatcttaaaaatgtagtaaataataaaatatgtcccacatgtaaaggtcaacgtttaaactcgaaaatattaagttctaaaattatgagtaaaaatatttctgatttcacacaaatgacaattaaggaaaatttagagtttcttaataaattagaagattcaacagctaaatatattattgatcctctcaaaaagcagttagaagcactagaatatattggattaagttatttaacgcttaaccgtgtcacaacaacattatcaggcggtgaagcgcaacgtcttaaattaatacgtcatttaaatagttctttatcggatttagtttacattatagatgaaccaagtgttggtttgcatccggaagatatagctaaaatcaatgaaattttaaaatctttaaaagacaaaggcaatactgtgttaattgttgaacatgatcccgatgttattaaagaaggggactatatcatagatatgggaccaggttcaggaaaaaatggtggtgaaatcacatttgaaggaacatataatgaattactctcttcaaatacttcgacaggtaacgcattacgtaacaaacataatttaaaagagaatattcgtgaagcgaaccatttttataatatcggtcctgtgacacaaaacaatttaaataacgtaaaaacgtctatacctaaacacgtattaacagtcttaacaggcgttgctggttcaggtaagagtactcttgttaaagcaggttttgaaaataatgaccataccatctttattgatcaaaaagcagttcaaggatctaatagatctaatctattaacgtatttaggtgtttttgatagtgtaagaagctttttcagtaaagaaacaggcttaaataaagctatgtttagttataactcaaaaggtgcctgtccaaattgtggtggaaagggctatattaaaacggaacttgcttttatgggtgatttttcacagacatgtgaagtttgtcatggtaaacgttataaacaagaagtattagatgctaccatagatggatattcaatcgccgatgttctcgatttgacggttgacgaagggattattttctttgataaaaagaatgatattaagtcaaaattacaatcagtaagtaaaacaggtttgaattatatgtcacttggacaacctttatccactttgtctggtggagagattcaacgcgtgaaactagcacaacatttagatgaagagataaaagatagtatttttatttttgacgagccaaccacaggcctacatgaatcggatatccctatattgatggagtgttttgatgatttaattgatcaaaacaatacagttattttgattgaacataatttatcgattatgtgtgaagcagattggatcatcgatgtcggcccaggccctgggttggatggcggaaaggtccaatttagtggaacacctaaaaactttattgatagttcagaaacattgacatctaaacacttgaaacgctatatcaatcagtagaaatagaagagttggatgagtttatatttattatattcattcaactcttttcttatcatagattctttcaatatagaaatattgaaagaattgtctatccagtagttccaccaaaagttgagtataagttaacaaacataggaaaaacactcgataaagtagtttatgcaatttgtgattgggggggatgaatttctggaagaaatttctaaatagaaaaatgttaaaatttaaatatatatgtaaaagacgcctcaactttgaacgagttattcaaagtaaggcgtctttatctatatagtattgtggttttaaaataactttaatagtattatcttttttctgatcaaagatgtcataaacttcttttacatcttctaacggcatagtatgagtgataatttctgttggattatttacttcacatacttccatatttttatatccttgataagtaactgacttcatacaatcatcctcttttagcaaatatgcgcctgttattaaaatacaaactcaaacgagtaaattaagtatttgcgttaaatatacataatttacatataaatcatgtgaatttattgaatataatcatcttttttaaaaaatagtatctataacaaaaggaggatattccccattcatttcccatcaattttattttcttatatggcctcactatctcagaatatcaatgtaactaatttttctactatttaccccaaaataaagcttaaaagtggatatattaatattactccaacaatgatttcaaaccatatagaagaatttgaaaaaatataaggaaagagaaaaacagaaaataatacataatttaacttattcgaagatgatataatatacaggtcgcctatctctcaggcgtcaatctagacgtagagaggaggtgtaattatgcttgataactttgttcacatcatgaccacagcagtgagtggttgtatcgtcgcattatttgcgcattaactacgtaatcgcaacgataagaaaaaataggagattatagtcacacctaaaaatcccctcactatcggaagtagtgaggggattggtaaattacgcttaataactttgataagtagattataacactggttagtatagaaattcaaagtggaaagattagtattacaaaaaacgtaataaaacaagcatggattgctacaaaatctaacgtttttcatgtttttttgtcctctgaaggaactatacgattagacggcacgtttatccagcctatatgccaattttaaatttgcatatagatgagcattgtctaaaaattcgtcactggttttgctcagatttttgtttttgaaattaaaatatatttatttggttctcatttgcgttttaagagtcattacatagttttaggtgaaatgttatataaaacacccctaaatgatctaaaaaagtgtcttaaaattgtaaataaggatattctaattttttataaatctcaagtagtgattaaaataaaaaataaaccaatttgtaaaatacaaactggttttgtgaattatgcttattttgctttttataaatttaagctatcataaaaaaagcaatgtgttattttgaaacaaaaaggagtttttgtgatgataactaagagtattaaatatccttatgcgaaattaacttttgatgttttaggtatcctttctagtatcacttttttaatattaattgctattaatttctatgctgattttaaaagtaatggtacttcgaagataggtgttgaatggactggaaatgatttcgttttaggtattgttttaatttgtattattttagtgtgtgctataacttcttttattttaaaatcgataaaaaacacgaaataaaaagtagaatatgtgtttatgccgagaaaatttattgaagttgagaagaacccttaactaaacttggagacgaatatcggcatagcgtgagctattaagccgaccattcgacaatttttgggattgttaagggttccgaggctcaacgtcaataaagtaattggaataaagcaactgacatatatcacaatttcaaaaaacatagtgggggatgtatgtgtttgaaaaattggatgctatagattctgcaccattcgatcttttgttattagcaaacccgtctaaagaattgttgttgaaacatctcgagagtggagaatgctttgtttataaaaataattttgaagttttaggatgttatattttgaaagaaattaacaaaaatagagttgagcttcttgatatagctgttagagagaataaacaagggcttggtataggtaaaaaaatgttatctcatttgtttaactacgttaaaaaaaatggatatacagaaattattgttggaactggtaattcaagtatagatcaaattgctttttatcaaaaagcaggttttagaatgtttgaaatagattttaatttttttgaacgaaattacagtaaaaatatttatgaaaatggaattttatgtagagatatgattcgttttttgaaacgagtgtgaacgagtttcttcttgtcttgatattatataaaaataaagttcttttcaaaaataggtataatcgttaatatgtcagcgtttatgcctacttttatgtatgaaaggaaaaattgataaaaaaaacagtaataagattaaagtgtcgagcaataatctaatactggaggtcttctatgcatttattaaattttacttctggtattacattggccgtactgtcagattcttctttaaataaagtaggagaatcttattactatggtttttatttagctagtttaccgattggagtattattaggagaatttcattaaactatttcaatcattttcctctaggaaaattacatattttcatgtttttttagcttattatgttttatttttacaatatattctaatattactttttccatcctattttctactctaatttgggttcttattggtatacccaatgttttactactttttatagttcagaaaataataaacgttgaaaaaataagaaatgtttacactgtaattaatagtttaagtattgcagtaatgcctgtagattctttgttcgtagctattatatctaaatatataaactcacattttattatgttaatatgtgcgatattagttttactcatctctataatatagatttcaattaaagagttaagaattcttccaaaaacagataaaataactttataacgattatctatacaaattttgaatggagagtacaattatgacatcgtcaataaaagttaaaaatgtttctaaaaatttagaccatacacatgtattagaaaatattagttttcatatacttaaaaattctatcactcttataaaaggaagtaatggttcaggaaaaagtgtaactttaaaattaattgcacatctctataaagtatctaatggttctataagcactgatggacaaataagttatgctcctgatcattttcctgattatttaaatttaacagttaaagaatatttaatatttgtctcaaaatgctatcatatatcatttaacaacgataaaatagagaaaataattaaaggtttaaaattacattatttcttaaattataaaattaaaaattgctctaaaggaacccaacaaaaaataaacctcatacagtgtctaataaaaaatgcagatatttatattttcgacgaactattttctggtttggataacgattctataaattatttagttaattatttatctgagttaaaaaaaacagctaccattattctaacttctcacgaaaattatattaatgaaagattagtaactgatattataaatatagaaacaaaagtacatacttcagtacaaaataaaagggaagataaaaaaatcattgttttagataacttttccagtattgaattatctgaaattgccaataatatatactttgattacgatacaattgaaaaagataataagttaaaattaaaaattcgtgttcctttaagcacaacaaatcaattgctatgtgaattaattcaaagaggcgcagtaatagatactataaaaaatgagggggatgatcaatgaattttctgaactatcaattcaaaaaatttttccgatcttatacatttatacctccatatataactcatattatatggatttgtattttctataattatagtaatcaaaatatactatctagttacgctgcatctgctatcattttattctttatctcttcttggataacatttattatttttgatttagagggaaataatgaaaagcatttattatttatacaattaaattctaaaattaaatttctaaatttaaaaatattttttgcctttatttcttcaataccattaataattatctctttccttttcccaattgttacttataggttttctgaagctataactttccgatacgcctttctaagtatatatttacatattatcgtagtcatattaggtgttattctcggatcattgattcgtatacaaactatattgtctagaaagtatagttggttattattagtactacttactttactatcaattattaaatttatattagttaacaatcaacatattttaaaatacgttttaattattgtgccttccgtaggggaatttttaaactatttcaatcaacctattgcaaaattatggtgttttgactttctaattcttaatactaatatagcggtatatatagtaataactcttattttaattaaccttatatttaaatattcagagaatcattaattaaccctattactaatttaaaatataattaatatggttctgttgcaaagttgaaaataaaagaagttattgaaaacatataaatcaagtagacaaaaatgattatgacaatcgtattgaacatggaaataaacttgataataaaattaatcataaaaaaagaagaaaaacgagtaagaacagaagagaaataactaaatgagaagttagtaagctattgaaaatatacaagtttcattctttagcaataagaagcttaatcaaaagggtacatttactttggtttattgaggagttggaaggttaacgtcaataaagcactatttctttataatctattttcagtagaaaggaattttttatgaatagtaattatattacttttgctttttttaatgaaataccgttgtttgatttcaaatttctattgttaaatcatgagattgagcaatggaaccaggaatatgaagcttttaattttgaatttaatggaattaaatttaaaagtagattggctaaaaaaactcctaaaaaagaggggtattttgttgcatgctggcgtaaaaatgagactaataaaaatagaccttttaacagtaaagaatcaaaagataaattgattattaatatattagacggatctaaaaaaggccaatttattttccctaaagagttgttggttgaaaaagggattattagttctgaaaaacacaaaggtaaaatggctattcgcgtttatcctagttgggaaaagaatttaaataaaacagctcttaatacacagaaatggcaaattccttattttttagattttactaaggggtttaatgagaaaaaaattaaggaattgtatagttcaccataaataacttaaaagctttatataaaggtgattgtaagcattcttgttcatttgactaacgagtgtaatataacaccttgttgtagactttttacaattgttacaagaccacttttaattgtttgaatactcctattttgttgattccataggcttcaaggcgctttaagactcctaccttttggaactaatataaaaaaataaaacgactcaaaagtaattgaagacgttcatttatttgttttgtttttttaaattggtaaggtgtttttaattcaataatgatcatattatttatttttaagttcaaggaaaaagagaaagaataaaattttgctatgctcaattttactaaaaagtgactcaaaataaagctcagtttagctttttattaatttgaaaatttataaaaaacgataaaatacataataagattcattgaatgatcgtactctaaaatattattttttaacttttaattatttcataaatgtctaaagagataaaaatgagcgacatatagaagaatatatttgaagaagcattgatgagtatattgattacaaataacttgaaattgatttcaagttttggatttttcgtagctcttttattccaaaattataaatataatgttttgatttactaccatatagaaatagctcaaagcagttttgtaagtcaaaatcatattcgatttttaaatttagttcacatttgcgttttatgagtctttaaattaaaaatgtataaagaatacctaaacgctttaaaaagtattttaaaattgtaaatagggtatttaaaatttgataactcctatgataatttttattaaaaaggagagtttctgatgattgatttttttaaaaataattcaaatactttttcacaacctatgattttggcatctattctttttgtttttgcaggtcctttaggagtatttttaggagtggttattggacttttacttggtagaaagttagataaaaatggaaattagacacgcatttatactgaaaaaatttattgacgttgagaagaacctctaactaagcttacagacgaatgtcgacatagcaaaagctatgagcccgaccattcgatattttaggaattgttaagtgttcttaggattaacgtcaataaagcaattagaacaaaataattatggtaaattttaaaaagggggggagatattttgaataaaaaagacgagttagatattccctttattatgtctaccgttttgaatattttatttttagttgggttaactttcttagttcaattagaaaatttatatattttaattccatacactattctgatttttataaatgcagtttatctagttgttagggctataaatatcactaaaaatagagcatgacatttaggcgaatttgaaacaagtttcttcttgtcttaatactatatagaaataaagttcttttctaaaaataaggagcgtaaaaagtacataatataaactttgaagtttaggagttgatttataaatgtatcgctatgatattaaacatactatcgctcttgttttgaatgtattttttgtaatatttatgccgttagttattaaatatgggaatacatttataactattatttggataatacttggagcgataaatgcaatttatatttatcgtaagaatgcaaaaatgaaaaaaggattacggaataaaaagtagaacatacatttatgttgagaaaatttattgtgcattgagaagaacacttaattaaacttgcagacgatgtcggcaaagtgtgagctattaaactggccattcgacaattttcgagtttgttgagggttccaaggctcaccgttaataaagcaaaatttttaatagacttaaaaatataaggagattttggatgattttaacgattttaataatctttttattgattaatgctttgccagctttttattttggaaaaaagtattttaatctaaaaaagaataagtctgaggataaagattttgaaagattatctgattctatgatgaatgtagataagataataattccactttctataatcatagttttaatactttattttgttcagaaataaggtttgattttaggttttaaaaacgagtggaacgagtttcttcttgttttgatactaatatcaacgtttttctctgcttttttgcattttaagatctgttaaatagttcataaactatataaaacaccctaaatgctctaaaaagtatcttaaaattgcaaatagaggtatttaaaattttaataagtcttgtgataaagtcctttttaaggagaggttctaatttgatatttatatacataattttttcagctgttttactttattatgctttgaaatatggtatcagaaatggatttgctgaacttgaagctaacaaagaagatttaatttcttatcaaaagagtttaaatttgtttgaagaaataggaaatatttattattcaatttcgacatctaaatctgagcaagtggatgaagcgaaagttatttataatagctcttttgatattttgttttcaggagaaaaaggcaaatatatatttgagaaattaactgagaagaaagaacaaatttctaaattaagtacagagaaataactagttcagaagatgtatttataccgataaaatttattgattattgagaaaagcccttaactaaacctggagacgaatggttggcttaatagctcacgctataccgacattcgtctccaagttttggatttgttaaggcttcgaggctcaacgttaataaaggaattggaataaaacgattatgatttattactcgacaaaatctatatcgtcataagcttttgtccaatgattaggctgtaattcttctaattttttatatttaacttcttgatttttgttagttacacctacttttacttggttactccaatataataatctttcttggcatgtcccacatggtgtaagtattttaaattcgctattttcgtcatctctaacaacgcaaattgagtgagttataacgtcttggtatttatgggcttctaagattgcacctgtttcaatacataatgcactagaagcgtttatgatttctggggcaacagaggtgtatgtgttaccattttttgaatacattgctgctgcgcctccccatccttttggatatcttttttttattagtaatttagcgtcttcgaaaagtttttgttctatattcattttttatccctcttaatttttgttttttgaaacgagtgtgaacaagttacttcttgtgttgatactatatagaaataatgcataattcgagagttaataacaaacaaattaactacgtttttatttgctattatgccgaaaaaatttatcgtaagttgagaagaacccttaactaatttgcaaacgaatgtcggtatagtgtgagctattaaactgatcattcgacaagttttgggtttgttaagtgttccgaggctcaacgtcaataaagtaattatttgttattctcttttgaatttgtatggttcatcaaggtctttttctataatcattgtatctttatcttcaaaatgaagtataccttcttcatctggggaatccttatcaaaatatttatcgttttttggttctgtgtagaaacgaatattcttttgttcttcatctttaaaattaaaattattcagtaagacggactctgatacatctgattctggatttattattttgatttgatcgtcttttatcttcattccagtaccttctataaatcgttttgctgctgaattatcagctgaccaagttccttgcatcttttctttgttagttttgttagtactacatccacttaacacaatagttaagctaagtagaaatactaaaaatgtaattatctttttcatatattaacccaccgttttttctttatggtaacaaaaaaggagcttctttgtttttatcactagtagatatctaagttagtaatcattgtgaaagaagttaggcatcttattaaaattaagctcgttattattactttttgataggtatttaaacataagatcacttatcagtagtaattttgtataagctatacctacttcattaccccttaaacctgatttaattattttttttataaatagtcaccaataaattttactaaaaaatgaataattgtacctaaaataatagctgataaacaaagtaagataatactatatttgtcgcttaatgataataaaaaatacaataagataaaaaatgcaactaatactattttaaaatttttttaaaggtctttttatctattttcaccatctccttttctagattcaagttaatataaaatgatattcacataaattatatgacaacagagaagtcaattaacgtagagagtagatgaatatcaatgttcgaatcttttgttcacattgcgaccatagtcatcatttgtttattatcagtatactaatcatttgagctagtattattgctttaataggcgtagctatattaaaacaattatttataaatcacagcatatctttttttataaaatggaagtataatattagaaagcttaatgctagggaggaaaagtgttggagtttataattgagtttatcttagcaatgatttttattcttttttttaaagtgcaaaaattatttttaccagatacatattttgctttcagtgatccttttattttgggggaaagtgtaagtccatctaaatacttgttgagatcttttgtaatttttttctttaacatgtttttttacttaatattaaatattttttatgaaggtcaagaaatccttaatttgttattaatcgctagttttctaggtgctttcttaatactttggcctattatttttaaacctagccgtaatttagaagttgggttgtccaaaaaatctatattctttttatattgtatttatatatcctttttaatttctagtatgataatttcacttttaactacaagtattatgaatttgttctttaatgatatggatatagtaactgttttttcttcaaataaagaaggaattatctttgaaattcttatgttgcctatactttctgtttttgaagcagtgttcactcataaatacaaatctgttagaaacgaaaatgctagtaatatgaatattaataacaacactgatgctgaaggtgatgaacactatatggatgagcatgaatattctaaaagtcataatgaaaatttcaaatatacagctgcatttattacttttataaatttagggttattagtgtttgacataatcaaaaaaaagaaatgaaagattgatatattatgaaaaataaaaaagtttatctcactgattttgaaatcaaggttttaaaaaacaaatttttgtcaactttttcatggaaccataaaaaagttgaatatatattaaatagtgattcagaaaatagggaaatcattttatttatttttataactgaaaatatgaatagagggggaatccttaattatactctcgaaagattaatactttttttatttcctaattttataaaaagatataatttatctattggatcatttcaaatgaaaccaagttttttagagttttacgcgccatatatagatataagtaaactttttaatttagattattgtattttagttttagataatttttttaaacatacaaattatttagcaaccgatcaacaattatcactatatcattctggtaaaattgataattattataaatctacacatatatatatttatttatataagtggtttgaaaatcattttattaatatgaaaagtcagtaatattatcaaacaaatgaatttattaagtttatagaaattaacatataattaattcaagttttaacacgatagatattgaaatcacatcagtattcttaattacattattagggataaacatttgtttattaagtgtatattatataatactaaagctatagaccatgtgtacagataagagattaaaaaggagcgataacaatgacaatagcaataattggtggattaatagtaacaactttattacttatagatgaaaagttaactaaaaagaagaaaaaatcttgatgtattaaggcataaattaaaaatgtaatatgttagaaagagataactgaaagggaatactttctttaagaatagtgaaaagtgttctgtgaaatttcaaatgctagtcaaaaatattattagtaatacaagacacaaattaggtataaaatcgcatattttaagtagcattaagtcacaaatttatattagcataataattcagtataagattttacaacatatgctaataaaatttaaagaagttttttaaatctataattaaaattgcttaaatgaaaatagctacatagaaaataaatgttaacatagtgtgatttattaaaccgcctataagactaattattagccattatttcttagttcttatggtttttttatagttatttaaacatataatgacttatcggaagttatatgtaactcatctagtacagatgatataatatacaggtcgcctatctctcaggcgtcaatttagacgcagagaggaggtgcatattagatggtcgaagctcttgttcacatcacgaccacagtcatcagtggttgtattgttgcgttatttacgcattggctacgtacacgtaacaataagaaaaaataggcgatattagccaacacctaaaaatcccctcactattgcgagtagtgaggggattggtgcatataatgcacgaagctcttgttgtctaaattataacactggttagtagaggaatgcaaagtaaagaaagttcttaggaatcaatttctaatttttttaataatattacttaatttttttaaacttctattaatatcattctcatcaatgtatgagtaagaaaatcgaatgtagtttttgtagttagaatcatatatttctccaggttgtataagtatattttcttttatagattcattaaacaatttttttacgtttattgatatagagaactcaaaccaaatataaaatgatccactagggttattccaactaccatacatagataaatgagtttttagggcgtctataaatatatctttacgtttttttaattctaattttaattcagatatatgtttttcatgataagtatttagccattttgtggcaatatattgtgatatagaactagcaccatagtcattctgcatttttaaatcagataagtgattaattacatttttatctgctactatccatccaatacgcagaccaggacttaccgttttagataaacttcctaaatataaaacattgtcactatttttcaaagatttcatgggcatcggtcttttttcatcaaaccataaatcagaatatatactatcttcaacaataggtattccgtttttttgacattgatctataattttttgcttttcttctttagtataagtattttgagtaggattgtgtaaagtaggtatacaataaaatatgctgtttttgtagttactacttattttaaatatattattaatatttcgctttatatagttgattgataaagggatcattttcgatttgatattatgccaagtacgtatggaattaatataagaaggtgtttcaataataattttagattgaggaactaataatccatcagctattagttttaatccttgaacagcacctgaagtgatacatatgttatccacatcacatatgactcccctttttttcatataatttactacttctaatctaagacttaattttccttttggttcctcataattcgtttgtatagagtcactaatactgtttgatattatttctttgaacaaatgatttggaattaactttggagataactcgccggtacctagacgtataatattaggattgaattctaattcattgattctttgaatataaaattggttgcttttagacatgctgttccctatataattttgccaatgaatattacttgtaatataagcattccatttatattgagatacataaactccttttttttcaatagtttccaaaatgccataacttttcaaaatatctaatgactgtataactgtagatctattcacattataatattgagaaatttctctttgagatggtaatttatctcctgatgataattcgccattgttaatcttattaataatatcatctattatcattttgtattgaaaatttcccatacttcttctccttaaatctggttggaattttatctttaatctggtagtttttttaaaatttcagattattataacatacaatccaaaggaggggttatgatgtcactgaaattagaaaaagcagttttttctaaagaaatcaaaaaagaattaaaacctttgatgaaaaaagataactatcataatatttttgctttactttttgattggttggttatttttggaagtgcttatttaagcataacaacaggaaatatatttgtttacctgcttagtattattttaattggaagtcgaatgcgagctgatgaagaaaatgatcctgatacaaaaagatatcgtattgttggactagataagccacaggaaaacatcaataaatttataaaagatcacattataaaggtgttattactgtttcatgtgccaaagtatatactaggtacggtatcagctaacctttatagtaaggacatacctaagtcagaactttggactagaaatattttatggttggttttgatatcaacatctatagtatttaatttttggttttaccttattatcttttggtttgtaccacttcttacaacttttcaaattattcgttactgggcagaaatggcagagcattcaggattaaacaatgatactgaattaacagcaagtagaaatacgtttggtatgccttggacaatatttttatttcacccacatcatgataattatcacttggtacatcatttattcccagctattccgcactataatttaaaaaaggcacactctattttgatgcaagataaaaaatatagagaagcacatcattgcacaggatttttcaaaactacattaccaggattttatagtgtggtaaaagatatttgtacatccaatagtaaaatgaaagagagttagtattatgttgcaaccaatcgtacatggtgttttattagcgctaggtctaattctaccgttaggagcacagaatgtttttgtatttaatcaaggagctaatcaaaagaaatttacaaaagctttaccagtcataataacagctggactatgcgatacatttttaataacaattgcagttttaggcgtttcattgattttaatgtctttacctacgttgcaattagtcatatatattataggccttatgtttttattatatatggcgtggtcattatggaatgaaaaacctaataatttagaaaatcatgactctatgagtgctaaaaagcaaattggctttgctatatctgtatcactattaaatcctcatgcaatcatggacacagtaggagtaattggaacaagcgcttctgtttattcaggttcagaaaaattcttattcagtatttctactattatgatttcatggatatggtttattttattagctgtattagggaagattttaggatctatagatcaaactggaaaatatataataattttaaataagatatcaagttttattgttattgtagttagtttgataattgtgaaaaacatcttacatttaatttttggttagatgataaaagaggtatttttataaaatgaaggcgtggtcttaaatgtctaaaagaacagatgcagacaattatgttatcaaaaaatacggaaatgatatcaaattcattcgagaaagtggaggcatcttctattatgaaattagtactttctggagtggaaagtttacaataaaagttaaagatggttttcttgggtggagtgatgaaaaactataagtaaaattagcgttatataaaatgacttatcggaagtagatatgcttgtatattcacagatggtataataatagagtcgcctatctctcaggcgtcaattgacgaagagaggaggtgcattactttgctaatcattttcgttcacatcatagcaccagtcatcagtggctgtgctgttgcgtattatacttattggcttagtaaacgcaacaaataattaataggcgactttataagccagcatcgaaaaaatccccacactattgcagtagtgtggggattggtgcattaattgttaatcattttcgttatctagattataacactggttagtagaggaatgcaaaatagtttattgattactaactagtgagtgatctttaataaagatactatttcactagaaggaatgcctatcttaaacattataaaagatttatgaagttgaagaacaaaattggagatattaaatatattatctttttgatatgtaggtttttctgatggtggaaaataatgagaataataatgtctataatccttcaaataatcatgtaacttttcgtcataattaacaatgctttttaaataattttgtaactcgttatctaatgagtgaaataaatctttatatctatctattaaaatgatttgctgatttgatacgagccttctatgcaaaccttcatttatttttaataagtcaactagataatgttcaataaattttggcgtatacattaacttaatataatttgaaaatatatcttgaaacgaatcatgattattataaaaaaaagaataaatatttgataaatatttattaaggaaatcttttgtaacgtacgtaatttttgttttatggtgctccttaaaattgaatggtaaatctacaaaaaccctaaaagcttcttttttagaatacaatatgatactttcaattttatgtttttcattagttataaagctaaaaatgtaagcaatattaagggcatctgaaatacatttatcactagttaaattgtttttatactcaaattttagtgaattctcatattgaaaggtgatttcgttaaatctagttcttttacgatttattttacaagctgaagaaagacgaacttcattcaatgaaattatttctttctttagattagctttatcgatagaaatagtatattcattgtttgtttgatcccttttaatatcaaatggtatatgatttatattttcttttagaccactaaatttaacacttatgctatcaaaagttttaggaatctctgtatgagaaatagatacccaaatttgagtgaataaatactcatattcgttacttcctggaaaatttatagtatgcctcgataaaatgccgtttctaagatacaatgtttctccttttgcagtaataaattggcattggtttattctttcttcataatccatatcagtattaaataataattgataattactaccatcactttttaaaattccagcttccttaaaatcagatataattaatgttccagatatttcaaaagtatcagtattactaattttttttaatttcattaataaactccttgcttaccaatataaaatagtatttatattatatcatttaatttcagagggtatgtgtttttagagtacaccctaatcatacaaaacaagttattgaatttatagtaacttaaacgtatgattagggtgtatattaattatggagtgaaaatgaatgattataggttatgcaagagtatcttcgacagatcaaaatttagagagacagatagataatttgaaaatatttggcgtagagaaaatatttaaagagaaacaatcgggaaagtcagtagaaaatagaccagtatttcaagaagcacttaactttgtgagaatgggcgatagatttgtagtagaatcgattgatcgtttaggtcgtaattatgatgaagtgattaacacagttaattatttaaaagataaagaagttcaattgatgattactagtttacctatgatgaatgaagtcattggcaatcctttattagataagtttatgaaagatttaatcatacaaatattagcaatggtctcagaacaagaacgaaatgaaagtaaacgtcgacaagctcaaggtattcaagttgcgaaagaaaaaggtgtatataaagggcgtccgttactttattcagcgaatgcaaaggatcctcaaaaacgcattatttatcatcgagttgtggaaatgttaaaagaaggcacagctatcagtaagattgcgaaagaagttaatataacaaggcagactgtttatagaattaaacacgataatgatttggtttaataaactttacttcgatgcaaatgagagcgtctcacagcatttcaaaacagatgatcataatctgttatgaccttttaataatgaaataggaaaagggagcgtaaatatgcgctctcttattttatatgtatttatttagcaataaaattatattataaattcaactttgcaacagaaccgaaatgaattaacattttaaataaaggttttttaattgaaaaaaggagaataaacaaatatgtacatattaattataataattcaagtattactcgcagtactgtttttacttacaggtattaagatatattctggtaagatggctcatgagtttaaacgtttcggatacccgaattactttaataaattaacaggatctattgaactaattggatctttatcaatgtttttaggtgtatggattaatttatttgcttttattggtgcgttaatattaagtatgactatgttagcagcagcagttacattattattaattgtaagagatccagttaaaaaggcaatgccatctgttgttttatttttattgaacattattatccttatttactacctacctttaataatatagaaataaagtggttctgtcgcaaagtaaaaaatatagctaaccactaatttatcatgtcagtgttcgcttaacttgctagcatgatgctaatttcgtggcatggcgaaaatccgtagatctgaagagacctgcggttctttttatatagagcgcgctctatataaaaagaaccgcaggtctcttcagatctacggattttcgccatgccacgaaattagcatcatgctagcaagttaagcgaacactgacatgataaattagtggttagctatattttttactttgcaacagaacctgataatacaatagattatctaaaaacaattttaaataaaaaaacgacaaaagaatcgacaaaatttgatgaaaaatcgacaaacaaaacagaatcattaaataaccaatatagcagttatatcgataaatacatagagcatttagaatcagaaattcgacaaaagaatcgacaaattgacgatttaacaattgcattaaaacaagaacaatctttgaatttaaatagccaaaatatattaagtaataccaaaaaaatagaaactgataatatagattcaaaagaagatatcattactccaaaagcatcaaaaaaaaatgaacaaaaacaatctatcttttctaaactattcaaaaaaaaataatgtattcacgcctaaaggcgtgaatacattattttctctaaaaagaaattatcacttgttaattataatatagttaatatttagcaagtgaagtgtggtttatcatatgcaaaaatcccactactgtccaaagcaaagtagggtttttatttaatatacaaaatacaaagcatttctatattgacaaaggataaaaatcatactaacttatgaatatatgctcatatattcataagttagtatgattttcttcgagtaacaaaacattaattgaaattttatattttttaactctatagttataaaaacaaaaattcaaattatagaaaatatttttcatcattaaaaagaggagggattaaatggaaaacgatcacaatcataatcatacacatggcgcgaacaaaaagactttattaattagttttattattattacaagttacatgattgtagaagggttaggtggtttctttactaacagtcttgcgttaatttcagatgctggtcatatgttaagtgattctatttctttaggtattgctttaattgcatttactttaggagcgaagcaagctaatacaaataaaacttttggctacaaaaggtttgaaatactagcagctgtacttaatggtattactttgatgttaatagctatctatattttttatgaagctattgagagatttaaaaacccccctgaggtagcttctacaggcatgttaattatcgccttggtaggcttgtttattaatattattgtggcttggataatgctgcgcgggagcgatgtagaagaaaacttaaatatgcgtggagcatatttgcatgtaataagcgacatgcttggatctataggtgcagttatagcagcccttctcattatattttttagatgggggtgggcggatcctttagcaagtgtgattgtagcaattttagtactacgtagcggcttttatgtaacaaaatcaagtcttcatgtattaatggagggagcaccaagcaatataaatacaaaagacattattaaaactattaaaaaattcaaagaagttaaaaatattcatgactttcatgtttggtcagtaactagcggattaaacgcgttatcttgtcatattgttgtagaagatacaatgaccattactgaaaatgagtttttacttaaacgtatagaacatgaactcaatcatcaaaatattcaacatgtcacaatacagactgaaacttctaacaataatcatagtgaaaaattgttttgtatcgtgaaagaagaagacagtcaacatcatcattaaataaacagccattattttttaataatggctgtttatttaattattccaatatatttaatatatcttttttgttattttcaaatcccacgtaatatttaaacaacttttttttaccccaaaaaatttttttataaaaaacaaataagggaacaattcggttgcctgatatttttttcatttcttcttctaagtccaaattttgacttacatctttatgactataactaatctcttgagagtttaaatacctttttgattcttggcaatcagagcatgtaggtcttgtgtaaagctcaagttgtatatttttatccaaatatatctctcctaatataagttttagcatacattttatacaagtgtacctcttaaaacaaactataaatattaattttttatatgaaacttttgtattgacttatacctactaggggtataatatagattccaacaagagataccccgttagggtatatgaggaggggtgaaattgaacactactactgttaaaaacaatgacgcattgctcaatagactcaaaagattagaaggacaaatgcgcggtttacaatcaatgatagcagaagatagatattgtatagatgtactagtacaaataacagcaatacaatcagccctaaaacaagtgggttttatagtaactgaagaccatatatctaattgtgtaagtgaaggtattaaaaatggcaacggagaagaaagtatcaaagaattgatggttgtattaaaacaattttcaaaataggaggaaagaaataattgagtgaaaatattaaaaaaacctcattaggtatcacaggcatgacatgtgcagcttgctcgaataaagtagaaaaaaatctaaataaattagatgaagttaacgctaatgtaaatccttctacagagaaagctacaattgaatataaccccaatgttacatcattagaagatattgcaaatacaattcaaaaaacaggttatggagttttaaccgaaaaagtggatctcgatgtaatgggaatgacgtgtgcagcttgttcgaataaaatcgaaaaagttttaaatcgaatctcaggtgtaaataaggctacagttaatttaaccacagaaagtgctactgtagaatacaaccctgatatgacgtctgtagatgaatttcaacaacgtattaaaaacctagggtatgaggcacaacctaaaaaagaagcatcagaaaaaagttcccaaaaagaaaaacaattaaaacgacagttaattaaattagttgtttcagctgttttagcagctccattgttaatgacaatgttcgttcatttatttggtattcaaataccacatatatttatgaacccgtggttccaatttgtattagcaacgcctgttcaatttgttattggttggcaattttatgtaggcgcttataaaaaccttcgtaatgggtcagcaaatatggatgttcttgtcgctttaggtacaagcgcagccttcttttatagtatttatgaatcgattaagtggttaattaatacaaattatgagccacacctatattttgaaacaagtgctgtattaattactttaattcttttcggaaagtatttagaagcacgtgctaaaacacaaacaacaaatgcgttaagtaaattgttgaatttacaagctaaagaagcacgtatattacgcaacggtgaagagactatggttcctttaagtgaggtaaaagaaggagactatttagttatcaaaccaggagaaaaaataccagtagatggcaaaataattaaaggtatgacttcaattgacgagtcaatgttgacaggtgaatctattcctgttgaaaaaatgcaaaatgataatgttataggatcaacaatgaataaaaatggagcaattactgttgaagcaacaaaagttggtaaagatacagctcttgcctccattgttaaagttgtcgaagaagcgcaaggttctaaagcgccaatacaaagactagcagatattatttctggatattttgtacctatcgttgtaggtatcgcgattttcacatttattatatggatttcattagttcagccgggacaatttgaaccagccttagttgctgcaatagcagtattagttatcgcttgtccttgtgcgttaggcttagctacgcctacttctataatggtgggtaccggaaaagctgctgaaaatggcattctatttaaaggtggagaacacattgaaggtacacacgctattaatacagttgttttagataaaactggcactataacaaatggcacacctgaagtcactgattttagtggagatgatcaaacattacaattgttagctagtgcagaaaaaggttctgaacacccactagctgaagctatcgtaagttatgctaaagaaaaatcattagaatttttagaagtagaccattttgaagctataccagggcgcggtataaatgcaacaattgatggtaaagaactttttgtcggaaatcgaaaactaatgagtgaaaaaggaatccaaactaatgaagctgaaacaaatctcgctcaatttgaaaaagaaggaaaaactgcaatgcttataagcgtagataacgaattgagaggggttgtcgctgtagctgatacagttaaagatactgcccaacaagctattcaaaaacttcatgaattaggtattgaagttgctatgttaactggtgataacaaacgtaccgcacaagcaatagcaaaacaagttggtatagacacgattattgcagaggttttaccagaagaaaaagcttctaaagtagcagaaattcaatctgaaggtaaaaaagtagctatggttggagatggtgtcaatgatgctccagcactagttaaagcagatattggtattgccattggtacaggtacagaagttgcaatcgaagctgctgatataactattttaggaggagaccttttattaattccaaaagcaataaaagcaagtaaatctacaattcgtaatattcgccaaaatctattttgggcgtttggttacaatgttgcaggtatccctatagcagcaattggtctgctagcaccttgggttgcgggagcagcaatggctttaagttctgtaagtgttgtcacaaacgctttacgtctaaaacgtatgaaattataagaatcttatatttcttgaaaggaggtgacaacattgactaacgaagttattaatgtagaaggtatgagctgtgaccattgcaagcattcaattgaaaaagcattaaatggattagatggtgtaacatcttcagaagtaagcttggcgaatgggaatgtggaagttgaatttgatgaaaatcaagtagctttcaacgactttaaagaagctattgaagatcaaggttacgatgtaattaaataatttaaatagttgggcatatcgtttaatgatatgcccttattaaaaattaaggaggataaaaatatgaatcataatcatgaatatcattcaaacaaacccgaaattaaagcaaatgttgtatatagagatggtaatatagaaattacgttagaagatgaatttaataatgccccattattagatactatgcatgaaaaagaaatgcatttcgttttagtatctaatgacatggagaaatattaccacctacaccctcaaaaaaagcatgaaggtttatttataattaaccaacaattagagccaggaacttaccaggcttttgttgatgttacaccaaaaaaccatgtgtattccgttcatcctattgaactgcaaattggagataaaataacctctacaacatctttaaattctgataaaaattgggtaaaagttaacaaaggagttcatgtaactttaaattctataagtgctaaagaagatgaacatgtccctttaactttcaatacagaattaactccccaaccttatttaggagctttaggacatgtgattatatttgatgagcaattaactgattatattcatgttcacccagaatcacctgattctacaaccttttatgctcattttcctaaaaaagggatgtataaaatttgggcagaatttaaatttaatgatgaagtgcatagatttacttataatattaaagttgcataaatctattagcaaaagcttaaaaatcagtaaattgtaaagagttatttagataatacaaaacgctttataaaaaatcgaaaatttaagatagaaagttgatgaagaaagtatcaaaaaattgtagtggttgtttatattgcaacattcactgaatttttatagttaataacctattatttaaggagtaatttattgattaagtttgaatattttgaggagaaagattttgatttattaataaactggataaactctcctgaacttttagtcaaatgggcaggtacagattttaattatcccctagatgaagaacaattaaaggaatatattaaagacacaaataaagaaaattctagtaaaataatttataaagttatcattgaagaaaataattcaaaaaaaattataggtcatattgctttaaataatatagattttaaaaattgttccgccacgttaagtaaagttttagtaggtgatccgcaaatgcgtggccaaggattaggccctaaaataataaagaaattattgaaaaaggcttttgaagatttgggactacacagaattgaattaggtgtttttgcctttaataaatcagctattaaaagttacaaaaagattggatttataaaagaaggagaaaaaagagactttagaaaattaaatggagaatattataatttatggcaaatgagtatgttagaaagcgaatggtcttgaataattttaaacaaaaatagtcctcttattttaataagaggactatttttgtttatttagagcgtacttaaaattaacatttttatatattatctttttactaaatataaatagaaaagagcagaaaggataaatataaacatgaatattgagctagctaataaagcacctgttgcttgctcactataaagaccttttattatatatagtatagccgtaaaagaaaaagtgatgatcattacagcaaagaaaaagattgttagaaatcctatgatactctctatggttctgttgcaaagttgaatttatagtataattttaacaaaaaggagtcttctgtatgaactatttcagatataaacaatttaacaaggatgttatcactgtagccgttggctactatctaagatatgcattgagtgagtgtattctttgccgtattgacgctttgatatctcgtctttctcactttaatatgacggtgatcctgctcaatgaggttattaagatatttagatgtacaatgacagtcgggattaagtttaaaatctttaatcaacttagacattgccaccttcgtcgaaggtgactggtctgtaattatcatttgaggtttaccaaattgtttaataagtcgcttaataaacgcatatgctgaatgattatctcgtttcttacgtaaccaaatatccaatgtatgaccatctgcatcaatggcacgatataaatagcaccattttccttttattttaatgtatgtctcatcaacgcgccatttataataagcttttttatgctttttcttccaaatttgatacaaaataggagcatattcttgaacccaacggtagatcgttgaatgatgaacgttaacgccgcgttctcttagtatttcagatatatcacgataactaagcgcgtatcttaagtaatagccaacggctacagttattacacgctctatataaaaagaaccgcaggtctcttcagatctacggattttcgccatgccacgaaattagcatcatgctagcaagttaagcgaacactgacatgataaattagtggttagctatatttttttactttgcaacagaaccttaatacttatattctatttgatattcagaaatatttttatgtcctttttctgttaactctgcgtatcgtgttgtcccacaaatcggaaaacatttattataaaacaattctacattttcagctaaatcttgtctcgctatactctcgagtgctaataaaaaagttttttcactcacatttaacgttttaaaatctacactttctccttctttaatcgataacagtacactatacattaaatcttgttttaacaacgttcatcacctcttatttatctagatgacgatacaaagttgctctacttatatttgtctgttcttttatctcatttaaagtgtattttttactcatatacatttcaatagcatcactaagatttttgtcgtttcttttgggtcttcctaagttttttccttcttttgcataattttctaaacctaaacgagttctaaatttgacaatgtcactttggaagtctgtgatatcatgtaatatttctataaattcacctttgatgtctttataaatataacgatttaaattaataacatataaagatatatcctcctgagaaagataatctaatatatctactaaatgtttcgtagaatctgcaagaatacataaatccgtaacgtataacatatctccagaaactaatttttcatttaaaagaacatctaatatattcctcttcttattattagcatgaatttcttcaacaatttcatttgtatgattttctattttctttttttgttcatttaaattgtcgtttattgtaacgggtctaatataaccgtatttcatttaattgcaccaccctgtaggtgaagtgtaacataaagtttcattaacgggtatacatatgaaacttttctgttatactttacaatataattaaataaaaaggagagtaagttatggttgaaaaattaaaaaatgaatggcttaaccagccaggaaaaaatatacttgccggtattgtagttgctttagctttaatccctgaagctattgcattttcaattattgcaggtgtagatccaatggttggtttatatgcttcgttcattattgctgtcgttactgctattgtaggtggcagaccagcaatgatatcaggtgcaacaggggctattgccttattaattgttccacttgtgaaagattacggtgtagagtatcttctagctgctactatactaatggggttaatccaattaattttaggactacttaaagttggtcgtctaatgaaatttatacctcattccgtcatgattgggtttgtaaatgccctaggaataatgatttttatgtctcaaatagaacatatctttggaatatcaatttcaacatatatatatgtaattatcacgttactcattgtatatataattccaagattttttaaagctatacctgcaccattaatagctattatcgtgttgactgccctttatatgtatacaggttctgacgtgagaactgtcggagatttagggagtattaaacaagctttacctcactttttaatccctaatgtgccctttaatttagaaacacttcaaattattttcccttactctttatctatggctattgtaggtttagtagaaagcttacttacagctaaaattgtagatgacgctacagatacttatagtagtaaaaatagagagtcacgtggtcaaggtatcgctaacatgattaccggtttatttggtggtatgggtggttgtgccatgattggtcaatcggtcatcaatgttaaatcaggagcaaacagtagattgtctacatttacagccggtatcgtacttatatttatgattattgtacttggaggactcgtagtgcaggttccaatgccaattttagcaggtattatggttatggtttctgttggtacatttgattggaattcttttaaatatattaaaaaagcaccgaaaacagatgcagttgttatgctcattacggtgattatcgttttaatgactcataacttagctataggtgttgttgcaggggtcgttttcagcgctttattctttgctactaaaatttcaaaagtagaagtaatttctgaagaattcggtaaaataaatcgattatcttttaaaggacaaatcttctttgtttctattgactctatgatggatcaaattaacttcgatattaaaaatagtaccatagaattaaacttcaataatgcacacttatgggatgattctgcagtcgatgcaattgacacgatagtacgaaaattcgaagaaaaaaataatattgttcgtatagaaaaattaaattcagatagtcgtaaaattgtttcagagttaagccaactaaatgaaaatcatttaaactaaaggagcgttatttatgtataaatcaattttattagcagcagatgggtcagaaaatagtttgcgttcagcaaaagaagttttaaattttatagatgataatactgttgttactattcttacagttgtagatgttgaggagtcgaaaacagatgttttacatggtaaacaaagttccagtttgacgaatgaaagagaagacaaactctctcatatcactgagttatttgtagagcataatgtgaaatatgaaatgaaaattgcacatggtgttcctgcggacacagttgtttcagttgcaaatagtggagaatttcaggctattgttttgggaacacgtggattaaatagtttgcaagaaatggtgttaggtagcgtcagtcacaaagtagcaaaacgttcagaaattcccgttgttattgtaaaatagtctgtctaactcaatccgtgaaaggattgagttttattttagaggtgaatattagatgaaaaccaaaaatttctattatggttgggttattgtatttattgctggtttgacagttttcttctctggccctggccaaacttattcaaacgcagcatttattgatgaatatattcaaacatttggatggagccgtacagaagtttcctcaatatattctttagctattctatttggaatcatatggggaattgcgaacggtctagaaagaattggaaccaatattgtttgggctaactactttggacgtaagcatgtagggagtataaatggaattggatcaactatgctagtgattggttcctctttaggaccattaccattaggcctaggtcatgatattttccaatcctattcattaactatttatatgatgattattttccccattattggtttagtttgtgcattattggctaaaaagctagttaaaaattattaaaatataccatagaaagaatggtatttaaggggagatgttatgaagttttgcaaaggaatatgtattctaatattattggttttttgtgatttgttgatttttaaacggtcgaaagtatggggagtagagcatgaatcgagtaataatcaaattcgaataataaaagaagaagactatacagatatggttattaaccaatactaatcatattttagtataacaatatatagataaacctctttataagaatggatatgttatacaaatctactacctataactctttattatgttaactaaagcaaaaggcttaaacgttgatttaacagcgtttaagccttttgcttatgattatcgtttatgcaggttttatacatcattgatctgatgcgttttcagtcattttcattgatgatcggtttgtatctttattcagtttacacttgtgtaaattacacaagtgtaaactacacaaatcattattcatgcggatactagtttactagtaaacaagtaaacaagtaaactagtaaacaagtttacttgtttacctgtaattgatatatcgtatttagatgttacatacaatatgcgtgcacacagtatgcttgcatattgtatgcacgcatacaggtcatagggattttgttataattggagagcacttccgtgcacaaaggaggtgtgatgtacaaatgaacattgcatttttcgtcgtaacaattatcatttgtcctgttcttacaggtatcgtagcaaattatttgtatgataaattcaaatgataaaaagaaaacccccacaaagctttggcaggctgtgggggttttgatgtacaaaagacatcgcacttttcgttaacttcagtatatccattatacttttatttgtaaactttctaatcttcccaatctagttctaattgttgtctaaatgcttgttgttgttcttttaatagtgctttttcttcttcagtcatttctctagttgtattactttgatttcgttcatgtagccattttggcgttttctctcgactgatatattgtttgggttgggctacattcgccattttgggttgtcgcttactatgaatgcgtttctcagcatcaaaagtaaactctaaccattctattttacgtccttttttcgctttaattttattgatatgtagattattgaaaatctgagatagttcattaactattggttttaatacccgtttagttatatcattcatttggtaagtttttgggacatctagacgatttttaaaatcatctaaattcatttttacataaccagtatgtttgtattgtttaagtatcctaaacatatttttagcataggtggatttgagatgtgtcatttccttcaactcaaattttgtaaaatcggcagttatagaatttaaaatatgttttaaatcagaattaatactaatagataaacattcttcatctaaatctactttataggaagtgaacaaaataaatttttcaaatgatctaccattacgttctatataagttaagttaagcattttatcgtatacatgttctaaatcattaataaaacgttcttgtgaacgagtatagtaattacttaaatattttaattctgcaaaaggaatagttacttttcttgtgtcttgctctttaagtttattacatagagtaaagaataaatctacttcagtgcttgtaaaacgtcttaatggaactaaattcatctcatttctatatactactgttggttctgttgcaaagtaaaaaaatatagctaaccactaatttatcatgtcagtgttcgcttaacttgctagcatgatgctaatttcgtggcatggcgaaaatccgtagatctgaagagacctgcggttctttttatatagagcgactcaatgcatatcttagatagtagccaacggctacagtgataacatccttgttaaattgtttatatctgaaatagttcatacagaagactcctttttgttaaaattatactataaattcaactttgcaacagaaccaatataatcatgtcgatcaagaagaagttatcgaaaaacatattaatcaagtagatagaaatgatcatgacaatcgtattgaacatgaaaatgaacaaactaatcacattaatttaccaacgataaatgctagtgactttcttatgtactatgcgaacgaaactgaaaagcaaaacaatattaatcatcagaaaaagaagaagaaacaagagagaaataaccaaatgagaagatagtaagcagttgaaatcatacaaagttcattctttaataataagaaacttaacccaatgtggtaaattagctttggtttaaagaaaacatttatatacttagataaggtacattctatgtattatcacaatgtattttaaaacgtgtataattatagaaaaaccttgatattatgcgattgttcacatatttcagcataaaaaatactaatgttcataaatatcgatagaaaaaattgagtttaaatatatcttaaagttagggagaaaaataatttggaaacaaaaattggacatcaaatacaaaagttaagaaaaagtaaaaacatgtctcaagaaaaattagctgaaaagttaggggtatcgagacattctatttctaattgggaaagagaagtaagtaatcccgacttaaaaacaattttagaaatcactaaattatttaatgtttctctaaatcaattaattaaaggagtggaaatcatgcaagttaataaatatgtttactctgcattagcattttttctaggaggtttcggggctcataagttttatgttaagaaaaataaaaatgctcttctttatttactattttgttggacgggaataccgggtgtgataggtatggtagaaggtgttttaacacttatgcgtccgagcgatagtgaaaacaatatagaaataaattaaaccaaaaataaaaagccgatgtatcggattttttttagtgtacatgtgaatattaaaaatgatggagtgatttcacatgaacacattcgttttcggcgtgattacaaagcgattagaagaaataggttttaatgtacacaaggtgtttaaaatgcccgaaaaacaggcactatttgaagatttgtaccattatgtgagatacgttaaaccatgcaaggctgaactaacaatggtggcattagatagtgatgaattgattcattacggttctgttgcaaagttagatttatagtataattttaacaaaaaggagtcttctgtatgaactatttcagatataaacaattcgataaagatgttataactgtagccgttggctactacttaagatacgcattaagttatcgtgatatatctgaaatattaagggaacgtggttttgatgttcatcattcaaccatttatcgatgggttcaagagtatgcacctattttctatcaactttggaagagaaaacataaaaaaacgtattataagtggcgtattgatgagacatatatcaaaattaaaggacagtggtgttatctgtatcgcgcgattgatgcagatggacatacattagatatttggttacgcaaaaaacgagatcatcaatcagcatatgcgtttattaagcgccttattaaacaattcggtaaacctcaaatgataattacagatcaagcaccttcaacgaaggtagccatggctaaaataattaaagtgtttaagctgaaacctaactgtcattgcacatctaaatatctcaataacctcattgaacaagatcatcgtcacattaaggtgagaaagacaagatatcaaagtgtcaatacggcaaaaaatacactcaaaggcattgaatgtatttacggattatataaaaagaaccgtaggtctcttcagatctacggattttcaccatgccacgaaattagttatatgttagctggttaggcgaagactgacacaataaaatggtgattagctatatttttctaactttgcaacagaacccttaatttcatagaacggcgaaattaatacatgttagtcagctaattgaatacttacattataagagagtagttaactttatttttaatttgcaccagaactttttaatgtattatttcatccttgaataaatcaccccattcgcatattgcataaaccaccttatctagcttgtagcctatagatgtcagcttatactccacttttgggggaactacagaataaatatgtctttcaataatttggtcctcttctaattctctaagttgtcttattagcatcctttgattgacatgcggcaactttttttgtagctcacttaatctcaatactttgtcttgaagtaaatgaaaaattatagggatcttccactttcctccgataacacataaagctaaatctttagaagtgaaaaattcttttcctttataatacaattttcatccttctttcttctataatattagaatttacattgttaatgcggaagattatataatcttccgcattaactgcttatttatatctattctaaattggcatgattattttgcatagttgtttcatcaacatctaattgtgtcattagtccaatgactacactatctaaaaagatttgtgatgattgttcaaacaaactacctaacggttgatcagacccagtagcatcgtgttttgtacctgctggtaattcaactactgtgtctgcaatttcaccaattgcagaatctagtttagttgttagtaataccacttctgcttcaactgatttcgctttatctgctaataagcgaaggtgttctgttgaacccgaaccagaaatcacaataaataaatcacctttttgaattgatggtgttgttgattcgccaataacaaatgcttgcttgcctaattgattgagtctcattgcaaaactatttgcaacgaatccagaacgacccttacctgcaacaaatatgcgtgatgcttcagttacttctgatgcaaatccatcaaactcttcatctttaacatgagataaagtaccctttaactcatctaaaattaattgataatgattaaaagttgccatcattatttaccttcaatagcgtcacgacattgtttagctgcttctacagggtcatcagcatttgcgataccgccaccaacaattactaagtcaggttcttctgcaacaatttctttaattgtatctggtttaataccaccagcaactgcgactttagaatttttaattactgatttaactttacgtaagctatctaatggagattgtccttcagcttgtaaatcataaccagtgtgcactgcaatatagtcagcacccatttcatctaattctttcgcacgtttttctaaatcttgtacagcaatcatatctactaataattgtttgtcatttttatgtgcttcttcaactgctactttaattgacgcatcttctgctacacctaaaattgttacaacatcagcgccgaatttaacagcttggcttacttcatagtctgctgcatccatgatttttaagtctgctaatactttagcattgcttatattttcatttaaatgttgaacggcaggtaaaccttcattaatcacaattggtgtaccaatttcaacaatatcgacatattcttctacttttttcgctaattctgctgcttcttctttatttaataaatcaatagctaattgtaattccactataattcatcctttcattaatttatacctttattttgacataattatcaataaatcaatactgacaaaattggcatatagggaatgtcagcttatctaaagggggtgactattttttcagtatgaataatattacactgtagtgtacagttggaattgtaaatataagactaataattacaaatttggaggctttttagatgactcatattcaattagattatggtaagactttagaattttttggagaacatgaattagaacaacaaaaagatatcgtgaagacattacacaaaacgatacatgaaggaactggtgcaggaaataatttcttgggttgggtagaccttccaattgattacgataaagaagagttttcaagaattgtagaagcttctaaacgtattaaagtaaattctgacgtgttagttgttattggtattggtggctcataccttggtgcacgtgctgctattgaaatgctaacatcttcatttagaacaaataatgactatcctgaaattgtttttgtaggtaatcatttatcatcaaattatacaaaagaattagtagattatttagctgacaaagatttctctgtaaacgtcatttctaaatctggtacaactacagaaccagcagttgcattccgtttattcaaacaattagttgagaataaatatggcaaagaagaagctaaaaaacgtatctttgctacaacagataaacaaaaaggtgcattaaaacaattagctacaaatgaaggttatgaaacatttgtagtccctgatgatgtaggtggccgttattcagtgttaactgctgtaggtttattaccaatcgcagctgcaggtattaatattgaagcgatgatgattggtgcagcaaaagcacgtaaagaattatcttctgacaaattagaagaaaatattgcttatcaatatgcaacaatccgtaaccttctatatagcaaaggttatacaactgaaatgcttatcaactatgaaccgtcaatgcaatatttcaacgaatggtggaaacaattatttggtgaatcagaaggtaaagactttaaaggtatttatccttcaagtgctaactacactactgatttacattcattaggacaatacgttcaagaaggtcgtcgtttcttatttgaaacagttgtaaaagtgaatcatccaaaacatgatcttactattgaagaagatagtgacgatttagatggattaaattatcttgctggtaaaacaattgatgaagttaatacaaaagcatttgaaggtacattattagcacatacagatggtggcgtacctaatatcgttgttaatattccacaattagatgaagaaacatttggctatgtcgtgtacttcttcgaacttgcatgtgctatgagtggttatcaattaggcgtaaatccattcaatcaacctggtgtagaagcgtataaacaaaatatgtttgctttacttggtaaaccaggatttgaagatatgaaaaaagatcttgaagcaagattgtaggttataaactataaagaaatgagaggatacaatgtctagtaatattggaattttaggtttaggtgttatggggaaaaatcttgcgtggaacatcgaggataagaaatattctgtgagtattcatagtagagataataatgaaattaatgatactattcaaaagtctcattatcaaaagatatatcctgcgtataacttgaaagaatttgtagattcattagaaaaaccccgtaaaattttgttgatgattaaggctggtagtcctacggataacatgataaatgccttacttccattattagacgatgaagatattttaattgatggtggtaatacaaactatcaagatacaattcgtcgaaataaaacattagctgaaagtggcgttaatttcattggtatgggcgtatcaggtggtgaagtaggcgctttaactggtccttcattaatgcctggtggtcaagaagccgcttataataaagtcagtgatatcttagatgccattgcagctaaagcgcaagatggtgcatcttgcgtaacatacattggcccaaatggtgcaggtcattatgtgaaaatggttcataacggtattgaatatgcagatatgcaattaatcgctgaaagttatacaatgatgaaagacttattaggtatgagtcatactgaaatttctcaaacattcaaagattggaatgctggagaactcgaaagttacttaatagaaattactggtgatattttcactaaattagatgaaaataatgaaccattagtagaaaaaatattagatactgctggtcaaaaaggtacaggtaaatggacttctattaatgcattagaattaggaattccattaacaattatcactgaatcggtatttgctcgtttcatttcatccattaaagaagaacgtgttaatgcgtctaaatcattaaatggaccacaagcttcatttgatggtaataaagaagaattcttagaaaaaatcagaaaagcattatatatgagtaagatttgttcttacgctcaaggctttgcgcaaatgagaaaatcgagcgaagatcacgaatggaacttaaaattaggtgaactggcaatgatttggcgtgaaggttgtatcattcgtgcacaattcttacaaaaaattaaagatgcttacgataataatccagaacttgaaaacttattattagatccatacttcaaaaatattgttacagattaccaagatgcattaagagacgtcgtagcaacaggcgttaaaaacggtgtaccgacaccaggattctctgcaagtgtgaactactatgatagttatcgttctgaagatttgtcagctaatcttatccaagcacaacgtgactattttggtgcacatacttatgaacgtaaagaccgtgaaggtgtgttccacacacaatgggatgaagagtaatataattactgttacggaatgaaaaccagaaactagctaatcaagtaaaaggggggaactgctttggataaaaatttatcatcattaataacaatatttggcggaacaggagatttaagttacaggaaattgctaccttctatttttaatctttataaaaagggtcactttaagaaattagttatcatttctacgggtttagaggatataagtgatgaagaatatagaagtaaagtaaaacaaattttattaagccaagaaaattttgaaatggtgaacttatttttagataacatattttactttcaacaaaatgttgaagataaaacaagttggaataaattaaaggaactttccaatgatattgataaaaaatattgtttggatggcaatagattattttacttagcaatgaatcctcaattttttaaaattataactcaaagcataagccaatcaggtctttctgatacaaatggattttcaagattaataatagaaaaaccatttggaaaagatttgaaatctgccgaagacttaaataaacacataagacagtattttaaagaagaagaaatatttagaatagatcattatctaggtaaagagatggtgcaaaatattgaatctttacgttttggtaatacaatatttgaaccattgtggaacaacaagtatatatcaaatgttcaaataactctatcggaaactttaggcattgaagatagaggccaatactatgattctacaggagcgcttaaagatatggtgcaaaatcatgcactacaaatacttactcttattgctatggagaaacccgaaagcagaaatagtaaagatattagactaaaaaaaatcgaacttttaaacaatataaaatttttgaaaggggctgatgtacacaaatattttgttagaggacaatatattaatggtattattaatgaaactccgataatgtcatatcatgaagaaaaaggtgttaatagtgattcaacaacagaaacatttgtagcagggaaattactcattaataatgatagatggaaagggacaccgttttatattcgtacaggaaagcgtttaaataaaaaagcaatagaagttgttatagaatttaaaaaattaaatagtaaattaatctatgaaaatgataatgaagatgttgattgtaatttaatggtaataaatatagaacctaatgcccaaatatcactatatatttatgaaaataaatcaactagaaataatagaaaccataatatacaaatctataacttaatagataaaaaacaagtagtggatgcttatgaatcacttatatgtgatgctttaataggaaatcaaactaattttgtacattgggaagaacttaaacattcatgggaatttatagattatataagtactgaatggaaaaaatctaacgtaacaataccacagtataaaccaggaagttttggacctaaagaaagtgatcaattacttaaacaagataactttgaatggtggaataatctataaaacgtaaatattgcaaaacactatataggagaagttaaatgaatattctaatagtatatgcgcaccctggacctcaatcttttaatagtaaacttaaagatattgcacaaacagtattgaaggagaatggtaataattgtcgttgtatctgatttgtataaaatgaattttaaccctgttgctcaaaaatctgattttaaatatttaaaaaataataacttttttaaatatcctatagaacaagagcattcttacaaaaataatatattaagtaaggaaattaaatctgaattaagcaaactattgtgggcggatattattatttttcaattccctttatggtggtcgagtgttcctgcaatattaaaaggatggtttgataaagttttaatatatggagggatttatggaggggcatatgggaagtttaagaacgccagattatctaataaaaaagctattataagtacaacaactggttcatcaggagatatacacaaacaagtactatttcacattagtcatggaatagttgaatatactggaatgcaatgtttagatacattaatcgcatatgaaattgataaagatcaaaatagtagagatgagtatatagaattttttaaaaacaaaataaagtatatttaaccaaattgaaatacggagtagagaaataaaaaagctaagtcattgatttattaaagcataaaacacttgtatgggctattatagggaagtattctcagaatgtgttaaaaatattattaaaccagaagacacagtaattaatttaaaatgtggtttttcaaaataatttggaaaggagtttttgtttgtgataatagagcaattaaaacaagaattagaattaaatacagtaaatagtatagaagtttattttcattctggagattcagtaattgcaagaaaaatagactattcacaaagttctgaaaaaattattaaagtacttaatccagtgcctatgtatattaatttagaaaatgtaacatacattcagttaagagaaatgtaataatgtagatagcatggttctgttgcaaagtaaaaaaatatagctaaccactaatttatcatgtcagtgttcgcttaacttgctagcatgatgctaatttcgtggcatggcgaaaatccgtagatctgaagagacctgcggttctttttatatagagcgnnnnnnnnnnnnnnnnnnnnnnnnnnnnnnnnnnnnnnnnnnnnnnnnnnnnnnnnnnnnnnnnnnnnnnnnnnnnnnnnnnnnnnnnnnnnnnnnnnnnaaataggactaaaacagaaacgttttagccccacctacttgcttaactacagttcattttcagatttactcaattgccattgaagataaagttcgactgcagttaaaagaacattaatcattgccaatgtaactttaatctttttcttattactcatatatgttcctcccttctttaatagcagcatgctatgttgtgaaattgtgacattgtattgatgttattttgttatctcctcctttacctttcgtttggtctaggtggttgccatagcaaccacttgttaataaaaaagtgatgggtgaatggtcacgtcgtttattaagtgtatgcattttttcgaactctgatttgagagacttcaaaaaataaccttgcatatcatgaacaatctcattttttgaattaatgtagctttaaaacgcttaaggacattaacaatttcaaattccatatcttctaataagtaatatgtatcaatagaattattgaaggatgtgcttttaacaatacagatttgataattttaatttcagctacagaaaagttacttaaatagttttgaatactttgcggtagttcttcgagtaattggaattttaaagcttcattttgatattataatcgcagcatatgtcgcttcagtactctctatattagaaaattacgtagccgaagacatggaaatcaatgaaaagggtttagatgacatacttaataccttatctagaatgtttgcgtcgtagaaaatattaatttcccatcccaacacacttgtttactatgacattatcttatttcttggtatgataagcatgatataaagaatattaaaataagaagtatttcaaatgatgtttattgttgtattcactgtcggctttattattcttgctattatgaaagagaaaaagaaaaaataatttttccctttttttatataaattgaatttatctatacctaccaataattgatgttggtagtatttttatttttaaaaatgaattttttgaaaattattgactattaaattattggatattattagagtagatagtttatcacattaaacacggagtatcatgaacactttgttcttatggtactccttttatttttttaattacttattaaataacaaattacctctattaataattatttttctctaaaaactcatttaaaactttatctgatattgattttatagaagtgtctttatctaatgccatctgactcaacctttttttgattatcgcatcaactctcatagttgaacttttagcaaccggtttataattttctgtatatttaactgctgaagtgtcaatatcatccaaaaaaccctttttcttttgcgcttcaaattttatatcatctaaaaatcctgccactatgatcacctatccttctattaattctattctttctactaattctttatatatcgcttctaacatatgcaatactcttttatcgtgcgtatctttatccctaataccttctgcaccaaacttcttaattctttctctttgaaatatttgatttttaaataaagcgcttgaaaacgtttctctagatatttctaatatcttttcatcaatattgccattcttcttaattaatactggaattgcacctattaattcaaatggcaaatttgattccttttttctatctcgtaaaaagttaacaaacgacaaactactctcatacgcagattgttgtgtttggaataccatgacaatgtaatcactcgcgtatactgcattatttgtgaaatctgaatttattgttggtggtacatcaataaatatatagtcaaaatcataatctcttttaatttgatcaataactgatttaagaatatatcgctttttaacaatatctgtttttgcaataatatcagataaattagctagtgaagagtctgcaggtattaacgctagtttagttgataagttgataatactatcttctaattcaccagttttaagggcatctataaatgtttgtttctcatctatagcttctggatatgttcttttcattatttgagtggcattaccttggggatcaaaatcaactaataaaacctttttgtcatatctttcagaagcaatatatgataacaaagttgatacagtagttttacctactcctcctttgaaattaccaatagttataactgacatacattacactccttaggttataatgtctatattataacagtaacttgttacatgtaacaagttactaatgtatattataataaataataatattcatgattatctaaacctattagaataactaatatgaattacttttaatagattaacaaaaacaaatcacatgttacatgtaacatgtgatttgtttttgtttttttgttacagtatttattgtttatactctactagtttgttattcttataaatatacaaaaaaacattcagttgttggcatcaactgaatgtttttaaaggtaataaaacgcacccaaacgttttaatatacatatatcgtaattataaccgtaaacaatatgtgttgcaactacacatatttaataattttattgtaaacgttttattacctctaaccaaattaaaatatggaaagaggttatttactatgtcaacaacaacatcttatagaaacgttcgaaaatcaaaatttacacaaatatcaaatgatttattaaatgatgaacaacttacattagaatccaaagcattattatctattttcttatctaattcagataattggaatcttcatatgtctgaaattattaaacgatctaagaacggtcgtgatgctcattattctgcactaaaaaaattaattaaagctggttacattgctagattagaatttaaacaaaattctaataatcaattcttaaagcttgaatatatttttagtgacaataaagaagatattaatgaaggtataaaagacgctcaaatttttgcaatagaaaatgaacaatcaattgtattaacttacaaaaatttagactgtcaaaagctagaaagttctttggaaaataaagagcaaagtgctgtagaaaagccgtttcctgaaaatccgtatacggctaattcgaatacggaaagtgcgtatacagaaagtcagaacattaataatactaataacaataatactaataacaataatactaatagtaacaataatggttcgaatggaatgagtggtaataatataaatagtatgcctaaaataaataaccattcacttcattcaaaccatgaaaataattatttactaattgatgaacaagctcatttattaaaacccttacctaaagatttacaagaattcattaaaagtaggtatatattagctgatagcataagtattataaataaaattatgcaagctaaaaaagaagcagctaatagacgtgatgatgttttattctttatgttcgaagaaaacccctttttatcgaaaaaaatcattgatattttaataactgtcaatcgagaaatgaaaaagaaacaagaatcagtccaagcactgttaggctattactataattcattagtgaatggattagaagaatttcattttacagagcaagcaagaaaaacagtacaaaataaaaaaatctatttctagatgaagctgaaacataattcctagcaaaatagccagtaaatgagtttttataaattcatttactggcttctttatttacaatacttcatattgttggctcgctttattaggggatagcttcggcttgtcctgttccctcaagagtctcgccaatatactttgtgtttatatgtaattttacattgaaatacttaaaaaaataaggcgctttcgtataatttaataaacttcactaaactaaattaacgaggtgccttatttataaagattataatatgactcaacttactctaccaatggaaacttcagttcttatcccaacaaatgacatttcaatacatgtaaatgtcatttgttgaaacaatccataagaccgaattcgatgaattcagacatcatcgtggtgcaacatcataccatccaaaaatgatgttaaaagtaattctatatgcctacacacaatctgtgttttcaggacgtaagatagaaaaattacttaatgacagcatccgaatgatgtagctatcacaaaatcaaaaggcttcttataaaatgattaatcgatttagaataaatccaaaagtagatgctttattagaatcattatttattcaatttcatagtcagtgtttgaaacaaaatcttatagatgatcaggccatttttattgatggtacgaaagttgaggcgaatgccaatcgatatacatttgtatgaaaaaatagtacttaaaaccatgagacaagaatgaatgaagattctaaagcactctatcatgaattgatgacaaataatatcatacctgagattaaaacagatcacgataatgacttaacaaaaaaagaaatagatttgattggtagtcatttagataaagagatcgaagatttaaaccaacatattgataatgaaaaatgtactaaaataagaaaacaaatacggcttaaaagaactaaattaaaaaatacaaaaaacaaattaatgattactctgagtgaaagcatagatgcgaagtccaaaaatctattttaaaaaatagaaatagttattctaaaacggaccatgatgccacatttatgagaacgaaagaagattatatgaaaaacggacaactcaagccagggtataatttacaaatagcgacaaattaacaatttgttttatcttataatgtgtatcaaaatcccactgatacaagaatgatgataccatttttaaattcaattcaagagacctacggtcatttacctgaatatattttaggtgacgcaggttatggtagcgaatcaaattatatggcagttatagataattttaatcgaacgccactcataacttatggaatgtttataaaagataaaactaaaaaatataaaagtgacatctttaatactcaaaattgggattatgacgaaattaacaatgaattcatttgtccgaacaataaaagaataggattcaaaagatatgcatatcgccatgataagtatggttttaaacgagactttaaattatatgaatgtgatgattgttcagaatatccgctgaaacaccaatgtatgaacttcaattcaaaaacaaataaaaaaataatgaagaattataattgggaatattttaaagcccaaattaataaaaagttttcagaaccaaaaacatctacagtccaagaaagattgatatggatcctgtttttagatttatgaaggctatttttggtttcactcgaatatctgtttgagggataaataaagtcaaaagagaactaggatttgtgctaatggcacttaatataagaaaagtaacaactcaacgagctgaaaataatcaaacacattataataaagacaatttctatattatttcaatagaaattgtctttatttacttatccaggaactttatgtcccggactctttttttctcattaattaggtaaaaatattatcatatagtaagtaaagttacactcattcatagtgaatcatatcgaagacgtgttagaaaaattaaaacatgatggggctaagcttttatctgaaactcatgacaattcaacatatgaagattctaaaggtagtaaaagtgtttatatcaaagcatcatttaatacgttaatagaattacaggcaataccaaacggctactattatccaaaagatagcgaatctgaagtctttattcctggataataaagtgtaaacagtaattattatctcagtaacgccaatgaattatttatcggtaatcaatactcacaacttacactttccatgagcaagtcttattgagttggtgtatttaccatcttttttgaagaattttttattataccctcaattgatctttcttaatgaataattcgttattcattccgtttactacaactttaccccttaattaattctaaaactgcgagttgacctgcctgttttcataggctaatggttttattagacattaacatagttagcatatccctacattcatcctgtttttaatcattttcgttagctagatcataaaaatggttagtagataaattactgacaacacaaatgttgtaaatcttgttaactttcatataataagaaaaatcgaacgtatatgatggtgacgtttgatttttcttattcgtactatagattttatatcttacatacgaacagggataactttttatgcaatcttaggtataataagtttgtttttagatgttttatatatttaattgtgaatacataaaactcagagagaaacataaaatattagagaaaatattttataaataataaaataaaacgtaaatgtaattttgttatctttacaaatagtttgtgtacatttaattgtactgccctgtttttgatgttaaaatcatacaagtattaaaaacaaaaaattcagataataaatcattatactgcaagtaaacttcaagtaatggaggaaaatatgtcgaataaaaacaaaaaattaaatgagagttttgcagaagaaaaagcgagagtgcgactatacaaatctggaaagaattgggttaaagctggaattagagaaatacaactaatgagagtgatgggtttaccttttgcaggtcaaaaagtgtctattggtgaagaattgaattctcaaaaatcaaaattcaaaaaaaatgcgttgaaaacatcagctttagtaggtggagcatttactttcaacatgttaaataaccacgaagtatttgctgcatcggaaacacctgtaacttctgaaataagttctaatagtactaccgtaggtgatcaaacatctactacagaaagtaaagacagtgctgcaagtacagaaagtaaagacagtgctgcaagtacagaaagtaaagacagtgctgcaagtacagaaagtaaagacagtgctgcaagtacagaaagtaaagacagtgctgcaagtacagaaagtaaagacagtgctgcaagtacagaaagtaaagacagtgctgcaagtacagaaagtaaagacagtgctgcaagtacagaaagtaaagacagtgctgcaagtacagaaagtaaagacagtgctgcaagtacagaaagtaaagacagtgctgcaagtacagattttggttcaacagttgctactaatgatagtaattcttcatcaaatagtacctcagcaattaatttaagaacatttagtagattggcaacaacaacattcgcagcagcagcagcaacttcaactacaaatacttatacaggtgcagggactgatacaaattataatattccaatttattataaattaacaactgtaaataatggaacgtctatgacttttacgtatacagttacttatgataatcctgctactacgacggttgaaagacctacagcattgtctaatagttacgcaatatacaacacaggaacaactaatcaaacgatgtttacactaggtagtgcatatggaacaccttcaacagcgacaagttatattaccgattcaacaggtgctcaagttagtaatccaagagcaaacacaactaatataaacaaacagggtagtggatatacttgggcaaacggctaccaaatgaatggagcccaagctaaacaaggatatggtttaaccacaacttggacagttcctatcaattctagtggagacacttcttttacatttaacccatactctacatctgtgacaggtgggacaaacttctttaatggtcaaaaagtgactgtaacagatccaactagtgcgtcaacaagtactgcgaactcacaaagcgcgtcaacaagtactgcgaactcacaaagtgcgtcaacaagtactgcgaactcacaaagcgcgtcaacaagtactgcgaactcacaaagcgcgtcaacaagcgcgtctgattcaacatcagcaagtgcgagcgattcagcgtcagtaagtgcatctgactcagcgtcagtaagcgcatctgactcaacatcagtaagtgcatctgactcagcgtcaacaagtgcatctgattcaacatcagtaagcgcaagcgactcagcgtcagtaagtgcatctgattcaacatcagcaagtgcgagcgattcagcgtcagtaagtgcatctgattcaacatcagtaagcgcatctgactcagcgtcaacaagcgcgtctgattcaacatcagtaagtgcatctgactcagcgtcagtaagcgcatctgactcaacatcagtaagtgcatctgactcaacatcagtaagtgcatctgactcagcgtcaacaagtgcatctgattcaacatcagtaagcgcaagcgactcagcgtcagtaagtgcatctgattcaacatcagcaagtgcgagcgactcagcgtcagtaagtgcatctgattcaacatcagtaagcgcatctgactcagcgtcaacaagcgcgtctgattcaacatcagtaagtgcatctgactcagcgtcagtaagcgcatctgactcaacatcagtaagtgcatctgactcaacatcagtaagtgcatctgactcagcgtcaacaagtgcatctgattcaacatcagtaagcgcaagcgactcagcgtcagtaagtgcatctgattcaacatcagcaagtgcgagcgactcagcatcagtaagcgcatctgactcagcgtcagtaagcgcaagcgactcagcgtcaacaagcgcgtctgattcaacatcagcaagtgcgagcgattcagcgtcagtaagtgcatctgactcagcgtcagtaagcgcatctgattcaacatcagtaagtgcgagcgattcagcgtcaacaagcgcgtctgactcagcatcagtaagtgcatctgattcaacatcagtaagtgcgagcgactcagcatcaacaagcgcatctgactcaacatcagtaagtgcatctgactcagcgtcaacaagcgcgtctgattcaacatcagtaagcgcgagcgattcaacatcagtaagcgcaagcgactcagcgtcagtaagtgcatctgattcaacatcagtaagtgcgagcgactcagcatcaacaagcgcatctgactcaacatcagtaagtgcgtaaaacaagcgtgtgtgtattggtgagacgatgatcatgtatttttttttttttcaagcagaagacggcatacgagatgtagagaggtctcgtgggctcgatcgtcgttaataattgttcgtgacgcttgtttcgctcgttctctctcttctcgatctcttcgagccttttcatgagcaagtcttgctgattctgcagcttgtcggctacgctcaagctcatttgtgtcttgggcgaattggtcccaatctgattgagtgacgcctgtatctcgttcagttgcttcatcacggtttgaagttggtcgtttgggctggaattcggtgtctgagtctcgttcttgttgttttcgtcgttgaatttgtctttcaaagccatcttcgatccctcctttattgtaatcttcgccgagtttacgtccacggacctttttatcttcggctaagtgtcgataggtaatgcttttgggtgtcacacgttcaatttcaataccatgttggtttaaatggtctttgaattcattcatattcgttgcttgtgattggtctatcgcctctctaatctcatctttccatgaatattgggctgttgatttcgtattagggtcagcaatcgctttttctgtctgcgtataacgtaagcgtgctgtgtccttttctggcacgcttaaaccatgttccaggcaaacctcgtcattgaaatctctgacattacgtaaggcttgtttattattattaaatttcttacctgtttcgaggtttttctttttcaagcagaagacggcatacgagatcctctctggtatcgtgggctcggagatgtgtataagcgacagacttctggtgatgtatctggaccaattccgttaccaacagaaaaatctgtttacacaattattcgtgcggtgcacaagnnnnnnnnnnnnnnnnnnnnnnnnnnnnnnnnnnnnnnnnnnnnnnnnnnnnnnnnnnnnnnnnnnnnnnnnnnnnnnnnnnnnnnnnnnnnnnnnnnnnactcaatgcatatcttagatagtagccaacggctacagtgataacatccttgttaaattgtttatatctgaaatagttcatacagaagactcctttttgttaaaattatactataaattcaactttgcaacagaaccactgaaaactaacaatccagattaagcatttgaaaaaacaattgagatgaactcaaaactgtcatgatttattttaagcttaacataatcgatgattatcagaagttccgtcactataaaactaattattatccatttttatcctttctttaagattgagagatagtaaaaaagttaactacacttgtagctaactttttttgttcgaagaaaataaaaatgcacctaagaataataaaggaaaaataacgaataaacgagtaataaaaaagttggtaggtaaaaatatataaataataaaagacaatatgaaacaaagaaaatatattttttatttgtactcatgtcatcacacctccagtattattgtattataacttttttaattgttctttaagttgccaatctccgctattagttcagaacattatctaaagattgctaccaatccaaaaatataatactaatgtaggaagctaatagataaatgatgacttttatataccaacttattttattttttataattataggaacgtatgctttaatgcgtggagaatatatgggtattgaatggaattttttattatctatgtatggcatgttcgttggatacttggtaatgttctatttttcgatttatactaatactgactttagtagaagaacaataaaaataatatcaacaatcagtattattttaacatctattatcttagttattttgggatatttactgtttattttactaacagaataaatatacaaaagggcttttctagacatgaatatataatctactttttatttttatatagataattaccaataaattctactaaaaaatgaataattgtacctaaaataatagctgataaacaaagtaaggtaatactataattgtcgcttaatgaaaataaaaaatacaataaaatcaaaactccaactaatgttattttaaaagtttttttgaaagtctttttatctatttttgccatctccttttctaagtttaagttaacaataaataatatttattatcatttatgattatcaaaagttatgttaatggaataaattaataaacttttcattaatagaacaataatatagatgtcatacagctgagacgtttaatcgtctcagctttttgcataataaaagagcagttataattgattgttattatgacaaatgtaatagttaaagtcacacacagaatgtgcttaacacgtcatatcacatatttaaaaggaagtgagtgccgtaataaatatattcaaaataagttataactacagattatttcatttgtatatttatatcattttgtcgatcatttcataatgtataagatagatatattttgaagtaattaagtaaaaaataaacggaattttcaatttaatttaaaaaattaaaaaattccgtgaaatatatttcgttttttagtaaactgtctactaaggaagaaagtaagtagtgagatattgttcgatttgaagccatacctcacatctaaattaaatataaggggatgacagtagattatggatttattaattggtacgttgtttttagttttagtcttagtgatttttacgttatttacatataaagcacctagtggtatgcgtgcaatgggagctttagccaacgcagctattgcgacatttttagtagaagcttttaacaaatatgtaggtggagaagtatttggtattaaatttttagaacaactaggtgacgctgcgggaggtcttggtggtgtcgctgctgctgggttaactgccttagctattggtgtttcacctgtgtatgcattagttatcggagctgcttgtggtggcttagacttacttccaggcttctttgctggatatattgtaggttatcttatgaaatatacagaaaaatatgttccagatggtgtggatcttattggttcaatcgttcttcttgcaccacttgcacgtttaattgcgacgggtttaacgccagtagtgaataatacattactaaaaattggtgacattattaaaagtagtacggacacaaatccaattattatggggattattcttggaggtattattactgttgtaggtacagcaccgttaagttcaatggctttaaccgcattacttggtttaactggcgtgccaatggctattggtgctatggctgcatttagttcggcatttatgaatggtacgctgttccatcgtttaaaattaggcgatcgtaaatcaacaatttcggtaagtattgaaccgttatctcaagcagatattgtctctgccaatccgataccagtgtatgtgacaaacttctttggaggagctgctgcaggtttaattatcgctttatctggtatgatcaatgatgcgacaggtacagcaacaccacttgcaggattcttagtgatgtttggttttaatagtccaatgaaagtgattatctatggtgttgtaatggccattgtaggtggtttagcaggcttccttggttctcttgcattcaaaaaatatccaattgttacaaaacaagatatgatagatcgtgaagcaaaaagaaaagttaaaacagcataaatatgagtgacttctttgtcgaaatatggcaaagaagtttttttgttgtacgttttaaattttctatctcatattttttgtgtaataatataataaaaagttacacatattgtaacgttaatacacatgatgtgtattgaattttcaatactaaacctctgacaaaggagtgggctaagatgcaaaatttaagaaatagaaattttttaacattacttgatttttcaaaaaaagaaatggaattcttacttaatctctctgaagatttaaaacgtgcaaaatatgctggtattgaacaacaaaaacttaaaggtaaaactattgctttaattttcgaaaaaaattctacacgcacacgttgtgcatttgaaacagcagcttatgatcaaggtgctcatgtgacgtatcttgggccgacaggtacacaaatgggagtgaaagaaacggctaaagatacggctcgtgttttaggtggtatgtatgacggtatcgaatatcgcggattttctcaacgtactattgaagaaattgcagaatatgcgggtgtgccggtttggaatggtttaacgaatgaagatcatccaacacaagtgcttgctgattttttaactgcaaaagaagtattaaaaaaaccttatgaagacattcatttcacatatattggtgatggacgtaataatatggcaaatgcattgatgcaaggcgcagcgattatggggatgacttttcatcttgtttgtccgaaagagttaagacctaaagatgagttactagaaacatgccaatcattggctgataaaaatggtggtattattttagtgactgataatattgaccaaggggtgaaaggatcggatgtgattgctacagatgtgtgggtgtcgatgggtgagcccgatgatatttgggaagaacgtattaaattattagaaccttatcgtgtaacaaaagaattaataaaaaaaacaggcaatccacataccatttttgaacactgtttacctgctttccataatacagaaacagaaattggtaaacaaattaaagaaaaatatggtttgaatgaaatggaagtcacagatgaggttttcgaaagtgatcgttctgttgtctttcaagaagccgaaaacagagcacatacgattaaagcagtaatggtggcaactttaggcgaatagagaaaaagggggacctatggatgtctaaaatcgtggtcgcattaggtggtaatgctttaggagaatcaccgaaagaacaattagagcttgtaaaaggaacagctcaatcattagtcggtttaatcaacaaaggatatgaagtggtcattagtcatgggaatggaccacaagtgggaagtattaatttagggttaaattatgcagcggaacatgaacaaggcccgcctttcccattccctgaatgtggcgcaatgagtcaggcgtatattggctatcaaatgcaagaaagcttacttaacgaactccatactttaggtatcaataaagaagttgtaacactcgtgacacaagtcgaagtagcaaacgatgatccagcgtttcaacatccaacgaaacctattggcttattttatacaaaagaaaaagcagataaaatgaaacaagaaaaagaatatgcatttatggaggatgcaggacgtggatatcgtcgcgttgtgccttctcctcaacccattaatattgttgaacttgatagtattgaaacactcattaaacatggcacgcttgtcattgcagctggtggtggcggtatcccagttgttaaggaacaaagtggtcgttatcaaggggtcgatgcagtcattgataaagataagacaagtgcattacttgcagcgcatttacaattggatcaattaattattttaacagccgttgattatgtttatattaattacggaaaagacaatcaaaaaggactaggtgacgtcacagtcgatgatatgaaaggatatattgccgataatcaatttgcgaaaggcagtatgttgccaaaagtagaagcagctcttcaatttattgaaaagaatcccaaaggtagtgtgttgattacttctttatcaggtttagatcatgcattagaaggtaaaattggtacatgtattacaaaataaatagttatattaaatcgcttgagcctaatatatgtattttacatatgtaggctcaagtttttttttgagttattcaaatatctaatggttacaagttacacttcgggttgtctgaggttatattcatagaccatttcattttaaaacaccctttgatttaatcaaggaataatgtaaacttataattatataaagtttacaattatgagttttattagtgtattttaaaagataggagtgacaaacatcatgacattaaatctagcagaacgtgtattgaatggagaagcgttaactaaagaagagtgtctaagtctatttcaagacgagacgattgatacgtttgaattattaaatgaagcctatatagtaagaaagcattactatggtaaaaaagtaaaacttaatatgattctcaacgcgaaaagtggcatttgtccagaagattgtggttactgtgggcaatctgtcaaaatgaaagaaaaacagcgttatgctttggtagatcaagaacaaattaaagcaggggcacaagtcgcgacagaccataaaattgggacgtattgtattgtaatgagtggacgtggtccttcgaataaagaagtaaatcatatttgtgatacggtagaagatattaaagctattcatccacaacttaaaatttgtgcgtgtttaggtttggttgatgatgaacaagcaacacagttaaaagaagctggtgtcaatcggtataatcataatttaaatacaagtgaacgttatcacgaggaagttgtgacaacacatacatatgaagaccgtgtgaatacagttgagatgatgaaagcacatcacatttcaccttgttctggcgtgatttgtggaatgggagaaacagatgaagatattatcgatatggcatttgcgttgaaagagattgatgcagacagtattccagtaaatttcttacatccgattaaaggtaccaagtttggtgggttagacttattatctccaacaaagtgtttacgtatcttagctctgtttagactgattaatcccacaaaagaaattcgaattgcgggtggtcgtgaagtcaatttacgttcacttcaagcaactgcacttcaagcggctaactctatctttgtaggcgattacttagtgacaggcggacagcctaatgaacttgattaccaaatgattgaagatatgggatttgagatagatgggtaatgatatatagataaaagaaacgttctcactaacaaatagggagaacgtttttatttttgttattagagtttcatactacatagtaatgagtcaattaaatacatataaatttatgtttatgatttttccgaatgatcattatttagagttttactatccttttcgcgtttttcgagtggaatagagtaatctttatcatccttaacatatgacatttggaaatgttttgtatgttctcgtcgtaaggcacgcataattgaaatagtcatcaaaagtaaaatgattgaaaatggtaaaccagtaacgacagaagctgtttgtaagcttgttaatccccctgctatagtcattgctactgaaatagccccaataagtaaaccccaaatgactttgtgttttatttttggattttcactgcctccagtagccattccagcaacaatatgcgttgttgagtcagcacttgtgacaatgaataaaaagattaacaaaatggcaaggccacttgtaatatcagataatggaaattttgataataattcaaataaagcaaccgtataatctttatctacaagactagcaattttatcgccacccatagcaattttgacagccataccaccgaagccacaaatccaaacgaatgaaatgagtggaggtactataagcacacacataataaattctcgaatggtgcgaccgcgtgatacacgtgcaacgaaacctccaataaatggtgaccaagaaataacccatgcccaatagaagacagtccattgttgaatccaagcattgttatttgtatacggatcaatacgtaaactatattcgacaaagtgtcttatgtagtctccgatagcaagtgtgtaagattcaaagataaattttaaatccccgaagataagcatgaagacaagtaataaagcgcctaatataatattaaggttactcagccattttacgcctcgtcctagacctgtaataccagatccaatgaaaataatcatcattaatactgtaatcgaaattttagtgatattgttatttggtacatggaagacatgatttaacccaccactaatttgcataatacccagtccaattgatgttgctatccccattacggtagcaataattgctaagatatcaatgatatttcgaaaaggacgtttataggcttcaccgaagataggttccatagcagtagaaattaaaccatctcgttttttacggaattgaaagtatgcgacgataagcccagccattgcaaaaatagaccattgtgagattccccaatgaaaaaaggtataacccatagcaagacgtgcagattctggtgattgatttggcacttttcctgggaaaggagaatgaagatagtgtgtcagtggttctgcaactccccaaaagacaataccaacacctaagccagcagaaaataacatgccaatccatgacatgaaagaaaattcaggttcttcattatcgtctcctaatttgaaccgaccatatctagaagtagctaaagaaattagaaaaatatctaaaataaatataataagtaagaaaagccaaccaaaagtatttgaaataaaatcgtacatcgtttgagcgtgtgtaccaaatgtcttaggaaatataccagcaattgcagtgataataataataatagacactgaaatgatataaaccagtctgttatttcttttacgtttgtcattcatgaatcaattaagtcatccctttataaattagttgttttgattatacatataattatgagtattttcaaaattcattttaatcgtttataaattactttaaagaaagttaacattaaatttgaaaattttttccaaaagaagaaattgcctaatgatgacaatatgaaatgatataatatctttgaaatgataagaaattttatagaaaagaaggggtatcatgtctcaatatgtcattacaaatggaagaatttatacggaagcacaagttattgaaaaagggtatcttgtcgtagaaaatggcaaaattagtgatattcaaaaaggtgattataaaggtcatttaaatcaaatagatgtagcaggaaagcatgtgttaccaggttttatcgatattcatattcatggtggctatggagaagatgcgatggatgcatcgtatgacggcttaaatcatttagctaaacaattattgtctgaagggacaacaacatttttagcaacaacgatgacgcaatctgatgagaatattgaaaaagcattaaaaaatattgtcgcatgttatgaaaatcaaacgttaggtgaagcagctgaaatcagtggtgtacatttagaaggaccatttatttctgaacataaagtgggtgctcaaaatcctaaatatgtacaacgtcccactgttgacaaaattcgacattttcaagaggtagcgaaaggattaattaaaatcattacttttgcgccagaagtcgaaggcgctcatgacacgttaaatgaattgcgtgatgagattattttttcaatgggacatactgtcgccacatttgaagaagcaaatgaagcggtagaacgaggtgcgaaacatgtaacgcatctttacaacgctgcaacaccttttgagcatcgtaatccaggtgtatttggtgccgcttggaccaatcaaagtttaaacactgaaattattggtgatggtattcattcacatcctgctgctgtagatattgcatataagcaaaaaggacctactcacatgtatttaattacagatgccatgcgtgccaaaggtatgaaagatggtgagtatgatttaggtggacaaaatgtgattgttaaagggaaagaagcacgtttagaaaatggcgcacttgcaggcagtattttaaaaatgaatgaaggactgcataatttaattcaatttacgcatgatagtttagaccacttatggcgagtggcaagtttaaatcaagccattgcacttaatattgataagcaaaaaggaagcttaagcataggaaaagatgcagatatcgtaattgtagacgaccatatacaagtagatacaacgattaaatcaggtaccattcatcatttttaagactactcgcatggtgaaaaatgaataatttagtatctctttatctttttaggtttatatatatgaagtttagtgtatatacatagtaaatctacataatatatgaattcgaagtaaaggagggatagataatgcaaaatgatttgagatttccaagtgcaaaaaatttctttactactttagggtggttatcagtcattgctttattagcggttgtagtggtcaatgcgctttataatagttcttttaaaagttggtcagatatcagtgtgaaattcactcaaacggatttaattttcttgattactttcgcaattattgcgatagtttgtattattatttcattacttttaaaattatttaaacatccataggaagtaaagttaacatattaaaagggacagaactcgagcgttctgtcctttttagtggtttaaataattaaatatgacatcatcaatgataatgtctacattcggatgcgtttgtaaaatagaagcaggtaatgtttcagttttcggtccattcattaaacgctcaatagcttcttgtttacgttctccaaaagctaataaaatgatacgttttgcgcgcataatagattgtaatcccatagaaatggcttgttttggaacatcatcaatcgtatcaaaatgaatactatttgctttaatcgtagaatcagttaaatctacaactcgtgtttgactgtcaaaagatgtacctggttcgttgaaaccgatatgaccattttctccaatacctaataattgaatatcgggttgtcctatagaggatagacgctgttcataagcatgtgcttcgtcttcaagatcaggtgcgtctcctcttggaatgtagatatgatcttcattccattcgttatgattaaataacagctcatgcatatatgtgtagtagctttgagggtgtgatgaattaagacccacatactcatctaagttaaatgttttaatatcatttaaattcacacgatttgccgttaataattcagataattgtggatagatttctgtcatcgtattacctgtcgctaatccaagagtagctgtcggcgtactttgtactaactttaacaactcaactgccacataatcacttgcgatagatttgttttttaaattgatcaatttcatcatctaaacgcctccatatgtttatgaatgattttttactgcttcaacaaatcgttcggtaatttgtttaggtcgtgtaatcgcaccaccaactactgtacaatgaacaccaagttcgttcacttttttatacatgtcaggtgtgatgacattaccctctgcaatgacttttgtgtttacttgattaagtacttcttttaaaaattcaaaatcattttcatataatatatgaccctttgtataagatgtataccctcttagagtggttccaatatagtcaaaacctaattgatctgcataaatagcttcttcaatcgttgagatatcagccataatttcaatatcaggcgctttttctctaatatatttcacaagttcttcaagaggttcttttggacgtttttgtttagtagcatctaaagcaatgacttcacaaccgctttcaatgagttcatttacctcttttgaagttgcagttataaacacacttgagttagtgtaatctcgtttaacaattccgataactggtaaattgatctccttgcgaatagctacaatatcttctatagagttagcacgtatacctactgcaccgccttgataagcagctaaagccatttttgacataatgaacgaagaatgtaaaggttcttcaggtaaagcttgacaagaaacgattaatccttgtggtaacatatcattcactccgtaacatttatatttataaatagaatatatcgagtttgtggttatttatacaatactgttgaattgatttactcatatcataacattaagaaaattattatcaatttaaaattataaattgaaaaatattttcatttataataaattagacataagttatttaattgagtaaagaggatgattgtaaaatgaaatttgaaaatagagttcagcgttgtcgtcatttattaacaaaaacagataaacgaattatagaatatatacaaaagcatccacttgatgatagtttctcaacaattaattcattggcttatgcaattgaaacatcgccagctacaataacgcgtttcagtaacaaattaaattacgataattttcaagatatgaagtttagtttgcaacatgaaaaatcagagaaatctgtagaaaatgcaccattagtacaacttatacatcgttatcatcaaaatatcattcaacaaactggagagtttatttctgaggaaaaaattaaacgcttagcacataatttaaaaacatgtagacaggtgaatttcgcaggtttagggagttcaggtttaacagcaagtgaattttattatcgtgccatgcgtatggggataaaaggtttagtatccacagatgctcatcaaatgaagatttctgcgtcattattatcatcgaatgatatgtttgtagcaatttcaaatagtggggaaacaagtgagcttatcgatgcggctaaaatagcacgaaatcaaggtgcttatgttgttgtaattactaattttgaaggaagcacaattactaaaaatgcagatttagtgctgattacgtctgcacagtccaataataatgatacaagatttattaattcacaaattgcaactcactttttattagatcttgtgagttacattcttcttggagatccttacatgcataaactctatcaacaaacacgtcaagttgttctaaaccatgggagcaaataaataagaggactagaatgcgtagtcctccatgtttataactactattgtattgcaccgtacaaagctgcattattaccgcttcgagtcgtctgaagacgtgctattccataatgaggcggaaggtaataatgaattttaggcttaatatattttaatagtgtatctttttgagaagagatacctccaccaatcaagataagttcaggatcatagataatttgtaattgagcgataccttcagctactgaatggctccactcttctaaaatattgattgctacagtgtcattttcttcagctaattcaaataattttggtacgttagtgtcatacttaaagtgatgtaatagcattaaatcttttagcgctgaagttgaagctctttgttcaaatgttttgtcatcggaagaacgataaagcaaataaccaatttcatttgctcgatgacgtgcaccttgatagattccaatagatttattataaaatgcaccgccaattcctgttcctaaagtaagacaaaagatgttattttcttcataattatgcaaagaaagctccccaagtaatgctgcatctacatcattgtaaacagttatatttgaggacaattccttgaaaacatttaaaaaatttgtgccatcaaaattttgaatagttggtccagtgtaaacaatttctccacgagttgaatctacaacgccagcacttgagataccaatttgaggatttttaagctgatatttttttataaatgcatcaatgattaagtatatttcgttcgttattaaaatgtgaatattgtctggagtagcaatggttttataatcaataatgtttaattcattgttaattactgcaagttttatattagtgcccccgatatcaactgcaattttatacatataaaaaacctccttagttttctttataactactataaatcatttttagtcctctagttttaatttgaaaattattttcattaaatttagaattatttgttaatatttttcatatagtattgtataaaaatatgatagcgtttacaattcgaaatataaatagaatatattgctgttgaattaataataaaattataaaaaattcagatcatatattggaggatttcgaatggaagaacaattaaaaggattatatgcagcattacttgtcccatttgatgaaaatggtcaagttaaagaagaaggattaaaacaaatcgcaaagaatgcaatagaagttgaacaattagacggtttatatgtaaatggaagttctggagaaaatttcttaattagtaaagaacaaaagaaacaaatctttaaagttgtaaaagaagcggttggaaatgatgtgaaattaattgctcaagtaggttcactagatctaaatgaggccattgaacttggaaagtatgccacaaatttaggatatgatgcattatcagcagtaacaccattctattatccgttttcttttgaagagattaagcaatattacttcgatattattgaagcaacgcaaaataaaatgataatttatgccattccggatttgactggtgtaaatattagtatcaaccaatttgaagaattgtttaataatgaaaaaattgtaggagtaaaatatactgcgccaaatttcttcttacttgaaagaattagaaaagcatttccagataagttgattttgtctggatttgatgaaatgttagttcaagcagttatttctggagtagatggtgcaattggttctacatataatgtgaatggccgtcgtgcacgtcaaatttatgatttagctcgtgaaggtaaagttgaagaagcttataaaattcaacatgatactaataatattattgaaacagttttaagcatgggtatttaccctactttaaaagaaatattaaaaacacgaggcatcgatggtggagtacctaaacgtccattttcaccatttaatgaagcaaatcgtaaagaattaaatcaattaattgaaacttataacttgtaattacgacacaatttaaacgacagaatataaacaaggggtgatccttatgcaacatataggatttgggttatggaattggatagcagttatcgtctatcttgtggcaatgttattagtaggtgcctattttactaaacgtgcaagccaagatactgatagtttctttaaagcaagcggacgtttaccatcgtgggcaattggtttttctatttatgcgactacattaagtgcaattacgtttatgtctacacctgaaaaagcttttttaactgattgggcctatatagcaggaaatattgcaattgtagcaattattccaatattaattgctttttatgttccattctttaaaaaattacatgtaacttcagcttatgaatatttagaagcacgatttggaccaagtatacgtttaattggatcattattatttattatttttcacttaggccgtatcgcaatcgttatttatttaccaactttagcaataactgctgtatctgatattaatccatatattgtagcaagtttagtaggtattttatgtattttatatacatttttaggtggattcgaaggagtcgtttggagcgattttatccaaggtgtcattttacttggtggagcactgcttatcattatcatcggtgcttttgaaataaaaggtggatttggcacaattgtacatgaggctattgcgaataaaaaaattcttagcgcagataattggaaacttaactcagcagcagcggcgatcccaattattttcctgggaaatatttttaataatttacatcaatatacagcgagccaagatgtagtacaacgttatcaagcatcagaatctatggaagaaaccaaaaaatcattatggacaaatggtgtcttagcactaatttcagcgcctattttctatggcatgggtacgatgatgtattcattttatcagcatcaagaaacattgcctaaaggttttaatacatcatcaattgttccatattttattttgactgaaatgcccccatttattggtggattacttattgcagcaatattcgctgcagcacaatcaacaatttcatcaagtttaaattcaatttcagcatgtacttctgaagatattaaacatcgcttctttggaaaaagggatgataaatcagaagtgaaatttgctcgattaattattgtgatagcaggtttattaagctatggtatttcgatgtatttaattgcagcagattctaataatttatgggatttattcttacttattactggattatttggtgtgccgttagctggaatatttgcagttgggatattcacaagacgtgcaaatacatttggtgtcattgtcggactatttgcaggagtaattatcgcttatttacttcatggaataggtggaggaaactcaccattttacgtatcaattatttcatttttagttgcttttattttaggttatatcgtaagcttgcttgtaccatctaaaaatgtaaaagatattactggtttaacgatttacgacaaaaataaagcttctacatatatatctaaaatagcaaaaagaaattaatttttaatattaagagagtaggaaaatgaattcattgtcaattcaatcttactcttttttctatgctatgataaatttatatacatcacttatattggagaataacaatgaaaataataaaaattgttggtatgtttcttttagcgataatcattatggttatttctcaaacaatcgcgctattatttgatataattataccattttatggaatcggaacgattttatcgagtctcacttatattttacttacatttctcgtcgtaagatggacaattactcatgtatttaaagaaactctatcttcatatcgaatgacaaaacctgtatttcatccgatttatttgattttagggattgcattaccgtgcgtagtatatgcgatttattttatttttataccgggagattttaaggtacatcattttaactcaatcagtaagacgatacacgacttgagttacattatttttatgcaagctgcagctggtgctattgtcgaggaaatggtgtgtcgaggtcttttaatgggctatattgaaaagaaaacaaacattcgaatagcaatcatcgttacttcactgttctttggcgtcattcatttattgaatggtgctctaaatgtgacaagtttctttttattgttagttagtggcactttagttggtatgatgtttggtatagcaacatatcgatttaacaccatttgggcgagtatcaccttgcatttcttttggaatgtctttcaagttgtttatatcactacaaaagaaactgactataacgtctttcaatatgttttacgttttaaaaatatggtgcttacaggaggacagtttggttttgaaacatctatcgtctctacgataggctatatcattgtgattattgttctgttaatgtgccgtacgccatataaaggtagcaacttataacgcattcaaaagtagttgtaattgttctatacttaaagtaaagataaataaacgtcgttaaggagaaaagttatgaaaaagatagtgatagtgacacttattctcatattatctattggcttagtgggatgtcatcgattgtctaaagaggagagtgacccttcggacaatgcgaaaacacaagaagaacattcaacagaagaaaataagagttctgatgatcaagatatcagtctagaaccagatacaaaaataccggatcatgtttttgaaaaaacatcagtacgacatgtacagatttctgaaaaaacgattaaaaaagatattaaaacgtatagtaacattgataaaaaaatcaatgatacgatgaatacatataaaatgaaattatattccaatcaaaagttatctaacacagaagcgaacaaattaaaaaagcttgttcaattagagaatgagaatgatacaaattttgcacaatacattcaaaataatcagatgccaaataatgattatgtgatctatactgataaaataagtcgttatatttcaacagccaatcgcatagagcaaaaaagtttagaaatctcattaaaatcggatgatgatacatctatttttaatgatattgagcaagtgaataaagatcaagacattgtaaatgatcaagaaaaacaagatattgccaatttcttggaagataaaaatattaaaactgaaacatttaatgaggattcaaatcatattgatatagattgatcgaatgaattaaaaaaggagtggaccgacgaattcaaaatgaattccgttccactccttttttggcgaaatagttgtcgacttcatttaacaggtatccttttttagctaaacattgcgataaagtaactcacaataatcacaatacccgttacaccattatgaatcatatgaaccatcatactatctctaacgttatgacgacgatgataagcgagatagaacaccatccccattatgatatacattaagaccgcaacccaatttgaaataccatgttgggaagcaaaaataagtgaggataaaataaatggtaaccagaaactgctacgtttaaatagcgtttctttaaagatacctcgataaattaattcttctaaatagggagctacaaacgtaagggtgagtgcaaatactatgacaggaaacgcttgtccaagttgatcgggagaaggtttcgcgccttgaaagttacccagtaatgccttatcattttctgtctgtgcttgacctgttattgccatcattagaaaactcattccaatgacaataacgcgaagtaatagtgcccatccgatattaatcataatatctttgcgtttaaacggtttaattggctcatatgtatgccgttgataataacgtctaaccagccaaataacgacagcggctaacagcataaataataatgttgctagtgttccacttgtaacatccatttttgcagaaaaattagtaataaataaaataagaacaataggaatctgagcaagtaacatccatcctataaaaataagaacatttaagaagcgattccctttaggataatgttcatcttttttatgataatgagagtcaagatttgaatctgaatgcatacgtgtttctgtaataccttgttgagtcatggttgtatcacctctaatgtttttatttgaactacgtatactgcaacttgaacataacatactctgatttcaacctacaacttactttataaaatatttgaactatttatgaaaagagtgagacaaaactcgttgtcccactctttattttgaattaaccaatatttaaatgtttaccaggtaaagctttcaataaatatgaatcatgtgtaatgataattaactgtaaatgttgaaattctcttaacatttgtaagatgatatcttcgttcaccatatctaaatttgttgttgcttcatctaaaatcaagacatctggttctacaagcaaagcttttgctatccatagcctttggaattggccaccacttaaagtactcacttttttaccaagtaattgtgattctaacttacattgcgacatgacttcttttattctgtcctcatgtatagctttaggataatgaaaatgaattaaaggttgttttaatatccaatgaactgttttatttggatcaagtgtactcgaatgatattgaggcacatattggatatgtttcatccatttgtgttgtgaaatatggccaagttctaaatcgttatatatgagtgtaccttgataatttgaatctaatcctgcaataatttgagccaaagtagactttccgcttccacttacgccacttatcaataaatgatcgtgtgtctctaatgtataattaaaatttttaaatatctgtttattagaaaaagctttatttaactgtttaatctgtaacatattgatatctcctattagctagttcaatcaattgcttcgtgtaagcatgctgaggatcacgtaaaatatcagaagcacgccctgtttctacaatgtttccgtttagcatgacactgatatgtgttgcatagtttaagactaagtttaaatcatgagttacaaatagcactgtcatatcatgttctgtcactacatgatgcagtagagccattaaactatgacgattgtgttgatctagcgcactagtcggttcatctgcaattaaaaactgtgcttctcttacaatagccatgacaagtgcaactcgttgtgccataccaccactcaattcaaaaggatactgataataaatggattcaggttggtccaatccgagatgtttaaattgacgtaatacaaatgctttttgctgatcacgtgttaatgaagatgacatagagtcaaacaatgcatcaaagtggcggttgatacgaacattttggaaaaaattgcgattcgcatcttggaacattgcatccgtttgtgttaaatcgagatgaatctcaccacgataggttaaatcatcttctttcatattcagtacagtacgtgtaagtaaagatttaccactcccactttctccaattaaacaatgaaagcttcctttttcaatctttaaatgtatctgtttaagtaatggttcatgtttgtgataaacagatacatcattgatataaaggactgtatctaatgtaggtgacgacgattgagtatttgacatatgagtgcgaaccctcctaataagacacctggaaagataaataaccagggcgcagaatagaaataacttttaccgtcatgtaaaatggcgcctaattcaggaatagggggttttactcctaaaccaataaaggcgagaccggaaatacttaacattaacttaccaaaatctgcagtaacaagtgccataatgtcactgatgagatgtggcacaatgtgatgtattgtaacttggaacttcgacatcccactaagtggcgcaaatttaacgaacggttgtgtcatcgtgtcacgtgctaaatttctgaaataccgcaaatagcgaccgagccagccgatgatgagtgcaagacataatcctactacagaattattaataaaaccaaggacgacaagcgcgataatgatagctggtaaagcgattaacatatctgcaagtgccataatgatagaatctaaccatttacctactatagctgaaataagaccaatgatcagtccaagcacgattgtccctatcataatgaatgcagtaagaccaagtgtaatcaagctacctacaaatagtcgtgttagaaaatctctacccaaatcatccgtaccaagtaaatgatgtaaacttgggggacgtaatgcttgagattgatgaatttgatttgctttatcatataggacataagcgagtacagctaaaatgattattgcaataggccatatgaaatgtttaatcttcatacgttactcgccctcctaacgttttcgacatattcaaacgagggtcacttttttctagtaaaatatcacccaggaaattcaatatcataatgattgtaatcatcatcattagaatacctagaatgagtggataatcccgaagattaatactaataataagcaattttcctaaccctgaaatactaaaaatgacttctaaaataatgactcgactgaataaacgaataaaattattaattgtaatcgtaagtaatggcgctaagatgtctttaacttgtacgtaaatacgatcttttaatttaaactgacgtaatgaggcaagttggtatgcttcattacgaagtgtacgttcaaatagatgactgctgagtaaaaccatatgactcccttcaactaagactaaaatagcgataggtagaataaagtattcaaagctataacttccaacaaatggtagaagatgccatttcacaccgaaatagtaaataaaaataatggctaaccaatattctggtagtgatgtcaccacttgagacgcacgtaatatgaatatagaccactttttcttaggataattcccacagagatagccaataatatagccaagtggaaataagatgatggctgagataaaaataagtttcaaggtaggagcaacggctttagcaatacggtcagtgacaggctcgccgttactaaagctcgtgcctaaatcgcctgtaaatgcatgacctaaccattgtaaataacgaataggcaatgcttggcttaatccaagtttatcttgagccatcttaattcgttcatctgtgatttgtgcgacaccatgttcatgtagatattgaatcgctggatttccagttgtatgttcaagtagcacaaataagataaacgaaataataatgaaatataatataagtttaagtaaatgtttaatcatactaatcatgatgagataccttcaatttatcgtaattaatgggtgcatccgtttgtcctgagaattcgaattgcttaattttaggacttgtaacaaacacttcgtttggataagcaattggcacttcaagatactgttgattgatgcgatgtgagatgtgattaaatgcacgttgttgatcatccttattggtaatggttgagaagcggttaagcattgttgttagctgaacatcgtttgcgaacataccgggcttatctccgtcttgcttaaagcgtgcatttaaaaagttatatggcatgagcgcattcgtataagaacgatagaaaataagatcataatcttttcggatagtgagtgtttcataatacgtttgggcatctaaaacgttaatatccaaatgaatacctacgtttttcaaatcttgttgcataatttctgcttttgttttccattcaggaaattcatcagtttggagcgctaattttaaagaaaggtctcgtccatttttttcaaagtagccccgatcattttttttatagcctaattgttctaataagcgtgtcgcttgagtaggattatatgaatgggtgtgttgatttgtatcattcacgaattctacgccgtcttggaataatcctttaagctgcttatttgatgataagtgatcagtattaatcgctttactgattacttcgcgcatctttttattttgaagtaatgagacctctggattaaaggccatgaactgtgtttctgtacttggatattgttttacctttaaatcttgattacggtatgattccttgatttgttgaggagtcaaatgtcctagtgaaccccctgtaatatcaatagaatgactttccattgcaagatgtctcgaatcgctatcttcaattgtttgaaaaattaaatcgtaatccaatggatgatggttgtgataataaggattcggtttaaaagtcacagtctcatttgttgaatctgctactttgaatggtcctgtaccaatcgctttttcaaattttccagtggttttaccatcttttaccgcatgtggactcatgatacgtagcggacgtatttgtgataattcatttaatacttgatttgatggcattttcaaatgaatatctacagtatagttatctttaatagtaaccgacttcagtttatctaatgtttccataggattcgttttatctgtcgctttcgcacgttcaattgaaaatttgactgctttcgcatcaaagttcgaaccatcattaaatttaatatggtgttttaagtgaaacgtataatcttttccgttattagagactttccaagatttagccaaaccaggctcaatctttccattttctccatatgtaacaagaggttggtatattgcactgtagacaggcatcggaacatcaaacgcttgtgcatctaactggctcgggttaaattctcgtgcaagagatactttcacctctttgtgttgatgatgatcatgtgtacatccagttaataggagagacgcacacatcatgaatgacaaaagcagatgctttctcaaatttaaaacctctttcaatttatatttgtcacttattaataatacacggtaatatttattttgaaaataaaaaacgtctacaaaattatatattttgtagataaaaagaatcgttttaattatagaatttgtatcttatatatcactaattatcttattttctaatgtgtttctcctaaagctactttaacatcagggaggtctgaaatcgtattgattgctgctgtaattccttttgtaatcgtatctaaagacagcgaaggtgtattaggtttatctatgacttgttctggaataaagggaacatggataaagccaaatcgtaagttaggataaaacttatctgcaaggtagcctaattgataaagtacatgattgcagacaaatgtgcctgcggtattcgataaacttgctggaacacccgcttttttaatcgcttctgtcattgattttataggaagatttgaaaagtaggctggtgcaccatctggatgaatggcaacatcaatgggttgatttcctttattatccgcaatacgtgcatcatcaatattaatgcctacacgttcaggtgtaatattaaaacgtccccctgcttgtccaatcgataataccacgtcgtaatgatgatgttctaattcatgttgaatcacatcttttgatttgtgaaatacagttgggatttctaatgttgtaatggtatgtgccccaatagtagggtccagttgtctaaccgcttctaatgccggatttaccttttctccgccaaacggatcaaatgcagtaactaaaatattcataagaaaacctctcctttaattttttacagtttaatacgtaaggtataaacacttatttacatcattaaacagatgatgatataaggcaacgtaaaagatatatgaacagtttgtgaattatttaaaattaagaataaaattaaactagaagggtaaaataattatgtaaaaggagtggtattatgacaaaaacagcagtcattacaggttcagcagcaggattaggaaaaggaattgctcaacgtttagccaatgatggatttaatattgtgattcaagatattaatcaaaaagctctagaaaaaacagaacaagaatttaaagagaatggatataacgtggtagcatttcatagtgatgtttctaagaaaaaagagcaagaagaattagttcaatttgcagtggcagaatttggtcaaattgatgtatttgtaaataatgctggtgtagatgcggtatcacctattttagatattacagaagatgaattggataaattattccatataaatgtatatggcacgttatttggaattcaagcggcagcaaaacagtttattaagcaaaatagtaaaggtaaaatcattaacgcatgcagtattgcaggacatgaatcttatgaggtattaggtacatactgtgctactaaacattcagtacgttctctcactcaaactgcagcgaaagaattagctgaaaaaggtattacggtgaatgcttattgtcctggagttgctaaaactgaaatgtgggatcgtattgatgctgaaatggttaaattagatagtaatctaaaacctggtgaagcatttgaacagttctcatcagcaattaaactcgggcgttatcaagaaccaaaagatgtggcttctttagtatcattcttagcatcatcagattcagattatattactggacaagccattttaactgatggtggactagtttatagataaaataaagaatgataaaagtgaaaaaataacaagcctctcttacaatttaatgtaagagaggtactttattagatttaaaaatatgttagtcattcactttttcagtatataaccctttattctttctcgaaaagactaccaaatcgtcacgatttattaagtcatcggtaagttgtaattctgtaatggtattcgagtcataatatttaatatagagtgtttttgtcgttaaattaaaaacagtttgatataacgtataataaaatccattgtctgaagggcgaacagcgccttttggtacactcacatggtctaaaattctaaatgcatctaagataggatggtcatcgctatttggtaataagtgatgaacaagataagctgctcgaacaaaacgttcgccagatgtataccctccaggtaaaccgaatgtgccattcgtattccctaagttcaattgttttgaaaatgtattgtcaatgttatatggtgtcacatgcataaagtgtttcaaattttcataatgccaatttaaatctgggttatttgtgagcacgccaattggattatcaatcacgacgatgcgaccatcaacaaatgtcacttccacagtgcgccctgtcgcatcagataaatgataatgtaatggaggaacttcgttaatatcactatatgaataggctacaacgttaacttgtttcgcattttcaataagttcttcaatagttctgttatagccgagcgcccacacaaggacttctgtttgcgaaatattgatatagccttcacgaatgtctgtcgcatatgacgcatatccacgatcgtattgatttgacatggcaagtccatgttcattgacgccatctccaaaaacaaatccctccatatcagaaccagcacctgcaaaggcatacaacgtttccccttcatagtcgacatgcgatttaaaggagtatcctcgaggttgaactgcaggaaagccgttcaaaggataatcgtaatccatcgttcttccaaaaataacatctccattgctggcttgaaatgtaatgcctgtacacatatcgtcgtctcctcgtaaattaatttttaattgctgttttaaaatataaacctaaaacaaatgttaacacataagcaacgctactaattacatatgcccacatcactccttgattatctacaacaagagaaatacctaaagtaccaagtgagaaaaatatactgcttaataaattattcagtatataggtggatgttagggcttcttttggtacttcacgttgtacaactgagtttaaagaaatatagcgtgaatcttcgaaaattcccattaataatgacatgagtaaagcaagtaacacagattgatgtaggataaagctggcattaataaaagctaatatgagcggaatataaataataatagggtaacttatttttgtgaaaaattgatctttatcattcatccataacccagcaataattgtcccactaaagaaagcagcattgatgagtccaaaccaaaaatcatcgacatgtaaaaatgttctcgtatatgtaagaataattgcagcaacccaaatggacgttgcgacagattcgaaaattatagatagatttagatataaactcagtttattggaatagttatgacgtaatacagttttaaagctatttaatatattttctttttcattattataaatatgccgttctgaaagttgaataataaagaagtaggataggatttctagtacaagcgcaaataaaaataaatatttagcgccaatcagactcatcagaaatccacctaatgcccatgtcgacaattgaaccatactactcatcatattcattaaagcgttcgccgaagttatgtattctttcttttcaataaaaggaatcatcgcgttcttaattggattggtaaatccatcaaatagagcatttataaatagtagaataaaaataaatattggagattcctcgaatataagtagacttgcgatgatggatagactcacaagtttaagcccttggaaaatccataatacttgtttttgagtaaaatactgataaatataatttgaaataaagctactaacaaagagaccggaagtaaaaataattggaatcatagaagcggcagtcgtttttgaggtcatactatatactaccgaaattaagccgacaacggttaacacgtctccagtatttgcgaatagctgactataaaaaagatggaagtaatctttactgtgcttcttcataacaatcaccttaggtaagtttcaatttaagttattatagcacagtaattatgtaaaagtaccctttaaaagtaggttgatacttataaagggtacatgtcattatgcgtgaatatgttcaggaacatctttaaagttttctaaacgacgattccattcctcatcactaatatggtgttttgcaacgtagcgattacgttcatgtttggcacagtcatatgaacatgcgccaagatattttgcttcatttttttcggatactaaaatttgtttattacattctggatttgcacagttaatataacgttcgcatggagtgccatcaaagtgttctttaccaatcactgttttatctacatggttcacatcgacactaatacgttcatcgaagacgtacattttgccatcccagtactcaccttttgtttctggatctttaccatacgtagcaataccgccatgtaattgtcctacattttcaaagccttcttttacaagccagcctgagaatttttcacaacggatgccacccgtacaatacgtcacaatgtttttaccatctaatttttctttattttcacgaatccaatctggtaaatctctgaagcgtgtaatatctgggcgaatggcgccgcggaaatgacctaagtcaaattcataatcattacgtgcgtctaaaataacagtatcgtcatcttctaatgcagctttgaactcactaggtgagtaatatttaccagttgtcacacgtggatcaacatcatcttctaaacctaaagcaacaatttcttttctaggacgtacgtgcatttttttgaatgcatgtccctcagcttcatcaattttgaacgtcatatctttaaaacgttcatctgcatgcatatgttcaatatattgatctgtatcttcttttgtaccagataatgtaccgttgataccttctgtagatactaagattctaccttttaagttatgttctttacaaaatgctaaatgttcagtagcaaatgtgtcagggtcatcaattgttgtatatttgtaatacaataacactctataatccattttctgattctcctctaaaagttaatttatctgtatgttaaacgtatctaaattgttatttatataaaaatcgacattataatattttaacaaaattataacttctttcaatatttgcgctcataaatcagtcaattgacctatacaaggagaatcattttacttattgaaatcgattacatatagtaagcttaagtttagaatgtttcaagcgtataataaactatgtaaatgaatgacataaggaggcttatttaatatgttggataataaattacctaaattaacgtatagtggtaaatctaaaagtgtagttcctattgtttctgaaagtgaattacaaacagtcacagctgaaccatggttagaaatttcagatgaaggacttcaacttgaaggacttatttttgatagagaacataacttatttttatgtgaagtatttggtggaaagattttcaaagttaatctaccaagcaaagatatttctgtagcgtttcaatcagaaaaacaaaatccagctgcagtaaaaattcataaagatggacgattgtttacatgttacttaggtgactttgaatctacaggtggtattttcgcaacagatgaacatggagaatactttgaagacattatttcagacatcaatacagattattgtattgatgatatggtatttgatagtaaaggtgggttttatttcaccgactttagagggtattcaacgaatcctaaaggtggcgtctactacgtttctcctgattttaaaacggtgacacccgtgatacaaaatatttctgttgctaatggtatcgcacttagtaccgatgaaaaagtactgtgggtaactgaaacaacgacgaaccgacttcaccgtattcaattagaagatgatggtgtgactattgcaccgtttggagcaaccataccgtattatttcactggtcatgaaggacctgattctgtttgtattgatagtgatgacaacttatatgttgcaatgtatgggcagggtcgtgttctggtctttaataagagagggtatcctattggtcaaatcttgatgccaggtcgtgatgaagggaaaatgttgcgttctacacatccacaatttattccaggtacaaatcaattgttaatatgtaccaatgatattgagaataattcagaaggtggatcaatgatttatacagttgagggattcgctaaaggacatgaaagctatcaatttcaatcgtaaatagctataaattacaattaaaaacatccttacttatcgtagtgagggtgtttctgaattgtattattgtagataggattttaattaaaaaaagataagtatcatgtgaaacataaatagatatcgattatactaaagaaaagaataggacatacatcatgtatgagaggagtattggatgaaagacaattggataacacataaagcagatagtctcgtaggatcattctatgaccaacaatcatatcaatttcaacaagaagggtttgaaacgacactttcctttggaacagcaggtattcgtggtcaatttggtttaggtccaggacgtttaaatcgatataccattcaacgtctagctttaggaattgcatattatttacaagataatatggcacaaccttccattgtcattcattatgacattcgtcatttatcagcagaatttgcagacattatcgcgcatattttagcgtctcatcatattaaagtatatgtatcggatacatatcaaacgactccgcagttatcttatgcagtgagatatcttcaaacgtctgcaggtattatgattacagctagtcacaatcctaaagattataatggcattaaagtatatggtgctgatggagcacagctcgacgatgtcgcctcacttgaagtagctaagtatattgaacaattagatgatccacttcatttagacattgaattaaatgagacgttaattaaagaaaatattttacctttaccaaaagatattaatcagtactattttgcggaaattaaccaattgattggtgacatacctccatcaaacttaaatgtggtgtatacgagtttacatggtacaggaacacctattattccgaaggtgctaagccatcttcactttaataagattgaacttgttgacgcacaatgtaaaattgatcctgattttagttctgtaaaaagcgccaatccagaagaacatgaagcgtttgatctagctatcaaacaagcccaatactctaaagcggatttaatcattgcgacagaccctgatgtggatcgaatgggattcgttgaacgagatcatgatggtcatattcactattttaatggcagtgaaataggtgcgttaatgattaaatatttagtcgattataggacgcttcctaaacagccagtcatgattcaatccatcgtaagtggtgaactagggaaacgtttcgcaaagcaacatggggtcactgtgaaggaagtcttaattggttttaaatttattgccaaggccattcgcgaattacgtgaggatgaaacatttattttcgcttatgaggaaagttatggttaccttgcgggtgaatttgtaagagataaagatgcgattcaagttgttccgttagtcattaaatatgcgtctattttaaaaaatgaaggtaaaacattacatgatgccttaacggatatatatgaggaagtaggatattatcgcgatcaacctacatctaaaatatttgaaggaaaaaaggggcaacaagaaattgcaacgttaatggaacaccttcgtcaacacattccagatacgttgggcggattaaaagtgatcgcagttgaagattatcaaagccaagagagaataaataaagatgatggtactactgagtcgatagctttaccaaagtcaaatgtgattcggttaatctttgatgaaggatttgtcgcattacgtccttcaggaacagagcctaaactcaaattctatctttcacttaatgttgatgattttgaacaagtgtcgcatgatatctatcaatatatatttaatgataataaataaaaatagaaaaataagtgtaaaagaataacaccttatatcgagtctttgtactcgtgatataaggtgtattttaattaattattaatattttcttaaaaagtcgagttgacgatgatataatttatcagcaatataagcttggacgcgtgtaagcacttcttcaatttcttgtgtcagattagataatacacggactgtaaaaccatgtgtaggtaattgcgtaataccaatacggcaatcgtattgctttgtataatctttaatttcatcatacacatcttcaatgaatttttgcgttatattagggtgtatacaataagccgaaccaagatgtgtatagttttccatatagccaatcgaactcatttttgtttcacttgggtgcattcgtaaattatcgtaggtgataagcacatcatctacataaatttcattaattaaatgcatgtagtcgtaagtgaatggtgtgtctttttcagaatagcctggggttaaaatatcggtatagaacatggatgcacttttatctaaattaaagacgttatgttggaaaaactttgctctttcataagcaataatagggtctcctacatattccatataaccatcttttgctatattgaatgtttggtattgtttcacgcaatcgtttaacgtcttatatattttagttgcaccttgagatgtcaaagtgactttagcatcttcttcaacattaatatccatacgataacgatcgccatctaaataaccaccgccaacattgacgatataaaatgttggaatcgtagagaaatttaaataaattggacgaataacctttaacgctttttcgaaaaagatattacgggcaacagaacgctcaccattattaaaaactgtgagattcaattgtccagtccaagaaggttttgaatcgaattgatgttgtaccattaagctaatcctttaagtaatgcatcgcgttcaatccattcaatgacattatctaaaccctcgtcggtttttaaatttgtaaatgtgaagggacgattgccacgaaatgttttagtatcttctgccatttggtcaagtgatgcgccaacaaattctgctaaatctgttttattaatgataaagtaatcagatttaatcataccttgtccacctttacgtggaattttttcaccttgagctacatcgatgatataaatagagaaatctactaattcaggactgaaagtagcagctaagttatcgccacctgattcgatgaaaataagttcaatatcttcatgacgatctaataattcatcgattgcagcaaagttcattgatgcatcttcacgaattgctgtatgtggacagccacccgtttccacaccgataattctatcttctggtaaaacaccagtattcactaagattttttggtcttcttttgtgtaaatatcgtttgtaatcacgccaatactcatatcttttgatagacgacgtacaagtttttcaattaattgtgttttacctgcacctacaggaccgcctacaccaattttaattggatttgccatgtatattacctcctatgaaataaagattctcacgtttacgttttcatgctccatttgattaagctctaaaccaggagctgttaaaccaaagtcttcttcgtttaatgtgagaatatgttgtcgtgtacgctcgatatatggaatcatctccgtcacaacttgttgtcctattgtttgacctaagggaattgcacgtactgcattttgcgttaaactggaaacgttctgatatagatagtaatcaataatcgtttcaatatcgacgcctaaataatgtcctagcattgtaaaacaaatagctggatgcagttttgcacgtttatctttcatctgttgatggtaccatttaatccatggactatcataaagttccatggccagttttaccatacgtgtacccatttgttttgcacctatgcgtgtttctcttggtaaactttggacataaattaattgatcaaggtgtaatactttttctgtatcaccattatttaaagcgttataaactaaacgcattgcaagtccatctgaatacgttaactgttcatttaaaaagagttctaaccattctttaaatgaatttgcatcgtgaacagcttgacgttgaatatatgtttctagtccaaatgaatgactaaatgcgccagtagggaattgtgaatcacagaactgaaatagtcgtaaatgtgaatgatcaatcatgtgaatgacctatatgtctgaaggctttattcacttttcgatcttcatggctatagggaatacctagcgtttttaataaatcttctactaggtagtcatattgtacaagcatttcagtttctgtgaattgcgcaggtaaatgacgattacctaattgatgcgcaatatctcccatttcttgtatgttacgtggcttaatgacaagtaaatcttccgagtttacatctactacaatcatattgttgtcatcttgatataaaatatcgccatattgtaaatcgataggttgttttaaacgaataccgatttcattaccgtgatctgttgtgacacgttgaatacgtttaactagatcagagttttcaagatatactttttctacatgcttttgtttttcctctgcagaaaggttagcgatattgccttgaatgtcttctactatcatctgagtacctcctagaataagaagtatctttgtgctaatggtaattcagttgctggttcacttgtgattttttcaccatctacaaatacttcatatgtttgtggatcaacatctaatttaggtgttgcatcgttatttttcatatcttttttagtaagattacggataccatggactggtcgaaccatacgttctaagtttagttggttataaataccgttttcgtatgctgttttagaaacgaatgtaatcgcagtgtgttgtttatttgcaccatattgaccatacattttacgatatttcataggttctgatgtcggaatagaagcattcgcatcaccattcactgctgagttaatcaatccacctttaacaacaagttcaggttttacaccgaagaaagctggattccatagaactaagtcagctaatttacctttttcgattgatccaacatagtcagaaataccatgtgtaatcgcagggttaattgtatattttgcgatataacgtttaatacgattgttatcgttatagtcagtatcaccttctagagcaccacgttgttctttcatacgatgtgcaacttgccatgtacgtgtgataacttcacccacacgacccatcgcttgagagtcagaacttaccatgctaaatacacccatatcttgtaatacgtcttcagctgcaatcgtttctttacgaatacgtgagtctgcgaaagcaatatcttcagggatagatgcatttaaatggtgtgtaatcataaccatgtctaaatgttcatctacagtattatgtgtgtaaggtaatgttgggtttgtagatgacggtaagatattcggatacgatgcagatttaattaaatctggcgcatgtccaccaccagcaccttctgtatgatacatgtgtaaaacacggtcttttacagcggccattgtatcttccatgaaccctgcttcatttaatgtatcagcatgtagagcaatttgtacatcaaattcatctgctacatccaatgcatgacttaacgctgaaggagttgcaccccagtcttcatgtacttttaagccgatcacaccagcatgaatttgttcaattaatgcagtgtggtttacagcttgccctttaccagtgaaaccaacattaattggtaaatcttcagcagcttctaacatacgatgaatataccatggtccaggtgtaacggttgtagctttagcaccttctgatgcacccgtaccaccaccgatatgtgttgtcacaccactttcaagcgcaacttctgcttgttcggggttaataaagtgaacgtgtgtatcgataccaccagctgttacgattttaccttcagctgagataatatcagttgttgaaccaataataatatctacattatccatgatatcagggttacctgctttaccaattgcaaagatataaccatttttaacaccgatatctgctttaacaattttgtcataatctataattaatgcatttgttaatactaagtcagccactttgcggtcatcgcgtgtaacgttagggttttgagccatgccatcacgaatagatttaccgccaccaaacgttgcttcttcaccgtaatttgcataatctttttcaacagttgcaaataagttggtgtcacctagtcgtactgcatcgccaacagttggaccatataaacttgtatactgagattgagtcattttaaagctcattactgtttacctcccattttgttcatatttttttcgccattatcaccttttggcgcagcatattcatcgtttttaccagttggacgataaacgcgatcttcgtcaatttcaccgttaactaaaccgcagaaaccataaattctacggttaccagcatattcaacgagttgaacttttttctcgtcgccaggttcaaagcgaacagcagcaccggcaggaatatctaagtgtttcccatatgctttttcacgatcaaattttaaacctttattggcttcaaagaaatgaaaatgtgaaccaacttgaattggacgatctccagtatttttaacattgatcactgtttcaaaatgaccttgattaatttcaatttctgtattttttattttaatttcaccaggtttcatttataaatcctccttacacgattggatgatggatagtgattaatttagttccatctgggaatgttgcttcaatttcaatatcagtcaacatgctatcgacgccttccatgacatcatctttatttaaaatttgtttaccgtaactcattaaatcagctacagttttaccatcacgtgcaccttctagtaattcatcactaataagtgctaatgcttctggataatttaattttaagccacgtgctttgcgtcgacgcgctacttcagcagctacgacaatcattaatttatcttgttcccgttgagtaaaatgcactgttatgccttctttctttttaaaataagtactgcaacattaatcataaaactgtagaatatttttaacaagtaatttatcttttaaatttatttaaaatcactttttcaattaaatttgtatatatttttaatgttacaaaagtgtttaaaaggtataataattagaaaggaaatgaataaaataataaaggtgagtttatgaaatatgtagagattttcttaaaaaatattgctcaagtcgtatttatgaataataaatggtcagggctgtgtattctgataggattatttattgcaaattggaaagttggattaggggcagcagtgggaagtctcattgcacttgttctagcgccgtactttaattatagcgaggatgaaatccatgatggattagctggatacaattcagtattaacagcaatcggattagcgttattcttagaagcatctttagtgaattggattgtacttattgtagcgaccactcttactttaccagttggagctgcaatccgagaaattttaaaaccatatggtctacccatgttaacttttccatttgtctttatgacttggttaattttagcaatgggcatgcaattttcaaaaatgcatatcacaatagatattttgcctactaaaattaaacatccagacatcagtcattcacatgtgaattttattagcggtatcattacaaactttagtgaaattttcttagtgacatcaatcattggtagtctgttaattattattggtatttttattggttcagtaaaaggcgggatctatgcagtagtatcaagtattttagcagtgatatgtatcacattactaggtggagactatcccactattactgatggattgtacggctataactcaatattaacgggtattgcgttgggtgcgacgtttaaaacaaaattcaatccgattcttgcagtgattactggtttattattaacagtagtgatgcatggtgcattagctacaacattagccccaattggtcttcctattttcaccgctccatttatttttgcaacgtggcttgtgatgtttgcaggtaaagagcagcatgaagttaaaagttagaacatattaatgagagtgagaccgcatttctttttaaatgtgttgtctcactcttttttttattatttatgctaatttagatatgatatggatgagaaagaaaaaggagagggttaatatgaaacgtatatatgttgtgggaagtatgtcgatggatttggttgtgtcgactgaccaagtgccaagtaaaggtgaaacagtattaggaaatacatttttcactacaccaggcggtaaaggcgcgaatcaagcagtggcagcagcaagattaggtgaccatgttcacatggtaggtgtattggcgatgatatgttaggtaaacaaattcttgaaaatctaaagcataatcatgtaaatgttgaatatgtaaaaaaagtaaaaggaccttcaggtactgcacacattacactagctgataatgataatagtattattgttgtaccttcagcaaatcataaagtcacagtctctttggtagactcagctttatcaaaagcaaataaaggagatattgtgttacttcaacaagagattccagctgatgttgttgctcacactgttcattattgctatgaacatgaacttacttctattttaaatccagctccatatagagacatttcagatgatatattggaacaagtaacatatttaacaccaaatgaaactgaaagtgaaaatatgtttgaaggagacattgatcaagcgttagaatgttatcctgataaattgattgtgacacaaggtgcattaggtgctgtattttacgatggtttagaacaaattgaaattcaaggaattgaacgagaagtaaaagataccacaggcgctggggatacatttaatggtgcgcttgcagtcggattacaaaaagacgattcgcttgctaaagctattgcatttgctaatgtcgccgctagtcattcagttacagcacttggcgcacaaggtggtatgcccacaataaatgatatagctcaagatttagatatgtaggttttgtatataaacgtgttaagtctattttaaaataagcgtattcaaaagttgaaacacatctattataaataatataaaattattatataatgttggaaggtattataatatttctataacttaaaggagtaactatatgactaagacatatttacttagcacgcttattgttttaatatctatagttttatgtgcatgtcaattttcaacattgtcatcatcaaagaaagacactaaaaaggataaagaaaatatcgcaaatatatatgcgaaaaaaagtactcagaataaaaaagattggcaagtgtatcaaggtgatattgcacatgtattttatcatccagtgattactgaacctaaagtagcttttacacaagagaagaatcaagctaagggtaattttgattggatgattacagctgatgagtttaagcgttcattaaatgaactctataaacaccattacatattaatagatccacatgaggcttatgatttaaaaggaaagacagttactagaaaagaattaaaattacctaaaggtaagaaaccattaattttatccattgatgatatgaattattatgagtacatgagaggtcatggatatgcagatcgtttagtgttagatcagaaacaacatgtcgtttctgaaactaaagataaaaatggtaaggtaacaacaagtgaaacaaatgatattgtacctatattgaatcaattcgtgaaagaccatcctgacttttcactcaatggtcaaaaaggcgtcgttgcgctaacaggatacaatggcgtgttaggttatcgaacaaatgagttaaataataaagattatctaaaacgtaaaagagatgctaaaaaagttgtcaaagcaatgaaaagagatggttggacatttgcaagtcattcatggggacatatcgattttgcaaatagttcatatgatcaaattattcgtgatacgaaacgttggaaaaacgaagtagagcccattataggcaaaacagatgtatttatctatccacacggtgctcaagatagagggtctaaagcatatcaatatcttgttcatgatgaaggatttaaatttttagcaggtgtaggaccaaataattttacagatatcggcaatgatagtgtctatcaagatcgtgttgcgattgatggattaaatttatatgattttaaatataaattaaagccatttttagatccgagtaaggtgtatagtgagaaagatcgtcaatattttaaaggagataaatcctatcaatagtatgctataaacaaaagagttggacaaaattcataagactatttgttcaactcttctttattttataattaaagaatatatattagatacttagttgtaattcgcctataaagttgttataaaatatattatacaatattataaaaataaaaagtaggtaatataatgtttttgaaagtaacacaaagtattggaatacttagtttatttacattattaggaacttcaatctctcatgcagcagaaacacccgttgatattacaaataaagaaggtaatgtcgcagtaagttcaaattatgaacctgatggtgtaacgcttacgacacaacaaggccaaatattatataatttccaaggaaataaagaagcggatcctgcttctttgtctaaaatgatgaccctttatttaacattagaagcagttcatcaaggaaaacttaagttagacgataaagttaaaatcacgagcgcgtatgatcaattatctaaaaagccaaatttaacatctgtccctttaaatcaaggtcaaatatatactattaaagatttattaacacaggcagccttaccttcaagcaattcagccgcaatgattttaggagaacaagtgagcggcaatacgtcaacgttcacagacaaaatgaatgcacaagctaaggcttttcatatgaaacatacacattttgtgaatccagcaggtgctgctaatgatttacttggacaacaagcaccaaagaaatatagaaaagatatttatcctaaaagtacgtcagaagatattgcgatattatctcatcacttaatcgccaaacatccgaaaattttaaacataacgcaacttagtcaagatactcaaaaaggttatacttttaacaatactaatttatcaattaaacatgagcccctttacttaaaaggtacagatggattgaaaacgggtacgagtgataaaggatataatattgctttaactaaccaacaaaatcaccttcgactcaatgaagtggttatgaatgtggcaccgtatatggataataatgctaaatacaatcgtaatcgaatagggaatgcgatttttaaacattatcgcaaagaatatgaatacaaaaaagtattatctaaaggagaacataagattggcggtaagacatataaagtagataaaaatttatatgataccgttcctaaagataataaaaaatgggatatacgaatcaataaagacggaaaagcctatgtgcattataaacgtgatttcttaccagaaacgacgtatccacgagtaaatgctaaaaaagtatggaaatggttctaaataaaagcgggatatcctttaccgtactattaattgtgagatgaaggtcaaacaatttaataagtcagtacgatatttgtttcccgctctcgttttattttaataactttaaatgaacttctctcgctccacaaatcatggtaacgatatctgaagacacgtcatcaatggattgttgaccatactgaatccagtttagaataacgcttaaaatgcctccagctagaaattctccataaatgaactcatctatgtaaaattgtccaatttgtttatcaaattcaatttgtcgtttaaccactgcataaatttgattatataaaatttgataaacttcactataaatattgatagaaatgacactttttaccattgctttgttatcactaatgaaaagtaaaatatctttcataaatttattgaaaaattgtctcggatcttttgaatcaatttcaggcaaatgtaacgttcgaaaatattcaattaatgtaccaacaatatgattaagtaaatcatacttatcattgaaatgacggtaaaatgtagaacgacgtacatttgctttttcgcataaatcttgaatcgtgatattgtcaaaagatttcgtttcaagcaaatctgagaatgtagtaatgagtgctttttttgttcgttgtacacgtaaatcttgattattcatgttgttcacctctcatttaggacattttatcaaaaatgtcacttaagttacattttcacttaactgactcacaataatattttataaaatgattataatataagcgaagggtagattaatttctaaagcgtttacttatagtttactacttttcatagattacttaaaaatataaataaaatgagaagtgaatcatatgtactatagtaatggaaattatgaagcatttgcacgtccgaaaaaacctgactatgttgcacaaaaatctgcttatcttattggctctggattagcatctttagctgctgcatgttttttaattagagatgggcaaatggatgggtcaaacattcacattttagaagaattatctaaatctggtggaagtttggatggaactgaacttccaatgaaaggctatgtcatgcgtggtggcagagaaatggagaaccatttcgagtgtttatgggatttatttcgctccatcccatcacttgaaattgaagatacttcagttttagatgagttttattggttaaataaagaagatccaaactactcacgatgtcgtgttattgaagaaaggggtcaacgcttgcctacagacggagactttactttaacgaaacaagcaatgaaagacatacttcaattatgtttgatgaaagaagaagatttaaatgatgtaacaatttcagatgtcttgtcagaggatttcatgaattcgaacttttggatttattggaaaacgatgttcgcatttgaaccttggcattctgcgatggaaatgcgtcgttatttaatgagatttgtgcatcacattggaggattagctgattttagtgctttaaaatttactaaatataatcaatacgaatcactcgtacgccctatggttgcatacttaacgtcccatggtgtgcaatttgaatataatgtccaagtgcttgacgataaagtagatgttactaccaaagacaaagttgctaaaacaattgaactaaaacgaaatggtaataaagaaacgattcagctcacactcgatgatctcgtatttattactaatggtagtatcacagaaagttcaacatatggtgataatgacacacccgcacctcctacaaaagatattggcggaagttggaacttatggcgtaacttagccaaacaaagccctgagtttggtaatcctgaaaagttttataaagatttaccagataaaagttggttcgtctcagcaacggtaacgacaaataacaagacggtcattgaagctatcgaacgtttatgtaaacgggatccattagctggaaaaacagttacaggtgggattatcacagtgaacgattctaaatggcaaatgagttttactgtgaatcgtcaacaacaattcaaacaacaacctaaagatgaagtgagtgtatgggtatacgctttatattcagatgagaagggcgattatatccataaaccgattgttgaatgtagtggtcatgaaatatgtcaagaatggttatatcatatgggattacctattgatcaaatagaatgcctcgcaacacaacattgtaatacgattcctgtatatatgtcttatatttgttcatatttcatgccaagagcgattggcgatcgaccacttgttgtccctcagcactctcgtaacttagccttcattggtaacttcgcagagacagaaagagatacagtgtttactacagaatattctgtaagaacagcgatggaagcagtttatcagttactggacatagatagaggtgttccagaagtcatggcgacagaatttgatattcgtgtcttattagatgcgatgtatgaacttaatgatcgtaaagacttgaaaacattagccgagcaaaataaaatacaacaagttgcattacacacgttcttgaaaaaaataaaaggtacgtttgtagaagaactcttgaagcaacataaattattataatagtgtgtaggtaaatgttaacccccgcgtgtttgagggcatgcgggggttaaatcattattattcaatatatcgtcttaaatgttttgctgtaacagagttgttaatatctaggagtcctttaggttctccagcatacaataattgtcctccatgtttaccagcaaatggtccaatgtcaataaatccatctgcttctgtcatcattgttaaattatgttcgattaaaataacagtattccctttatcaatcaaatgattaaagcattcaacgagaataggtaaatcgtcttcgtaaagttctgttgtaggttcatcaaagataaatattttttaagttattttgtgttgctcaataatttcgatatcggacatggtttttacctcattgctattattacgcgacagtagtaaatgtattcacttttctaaaggaagaatagtaacgtcaagattaaaataggtttttaaaaaatctttataattttcacgtgtgacagcgaattgctcttttttatatcttttagtaagggtaaggtgatgataagacatcgtagctcgaccaaaattttgtggttttgtaatcatgagttgctttacaaatatagattcaggatgtgaggtattgtagttaatcattttatcaaaatcatgaatatcacgagaaataaactctgctttataacgtgttacccacgttgtttcttccagtttttgaagaagatacgtcgtaggggtttcaaaaatggcacgaaattgacctgtcttttcaaacacaatttgtgtcgcttcaattgaagttattgggagtgcttgtaatggtaaatcgccaaatcccacatcagcaatatagtaaccattgttaataagaacaactagtgataaatgagagcctttagggctgtagttgccattaggctgatgaacggttgctgacattcgaaacactttaaaacctttagcttctaagtagctaccgaagaagtgattcatttcatagcaaaacccaccacgatgttgatatataaatttattaaataaataatctaaatcaactgaaatcttttctttattttgaacactaatattttcaaaaggaacggttagcataaagcgttccatataatagttaagtgcatctaaagtaggttgaggataacgttgagactcaatatttaaataatcttcaattgctttaatatccatagtttctcctccttaatcaatatgtatccaaaatataaaatagagcaaacgtgtgttcttcaatgaacacacgttggtgattatagttcttgtttcttaaaaatagatagtgatgaaaaataagaaatgacaaaaataataacaccaagcaatgcataactaccagttgctactaaaacgagtgggtttgaagcgattttacttattgaacctgcttttatgagtattggcataacagcaaagaaccacatggataaaaataatgcaacagcaacaactgctgtagtaagcataatgacatttgaattctcaggaccaaatttaaatgtgagtggaaacattaatgcatacgtacaagccatcccaatacctatgaatgctgaaaataatgtaaccataatatcttgagtcacgataagacaaatgatggcgccaattatcaaaccaagtaaaatgagtaaaccataaaaggcaaagtatgcttttacataagtatgtctatgtgtaggaagggtagacacatagtacatccatttagaatctttttcacgttttaagttatctgatacgggagataataacatgaccattagcatgaaacaacacatcattggactaaaaaatgcaaacacaatacttaatacgataccaataattaaataggttatgagcgattttttagaagcataaaaactactaagtataagtcctttcattatttatcacctcgcataattaattttgtagcatcatcaatactttgaagcgggcgtgcttgttcaaagtgttgacgttgcttgactaacgtttgacgttgaccatgacgtattcgtgaagcaatgattacctcttgaggtaagtctaaaggggaagtttcatctgtttcgataatgccataatcagttagtaatatatgtttgtcttcttgtaaaagaatatgaccatcgcgcataaaaataagttttgtagcaagttgttccatatcctctgaaatatgagatgaaagtaaaataccatgcccttttgatacataatcttcgagaatttctaacacttcttctcgtcctgaaacatccataccagctgttgcttcatctaagattaataattttgtctcatgagaaagtgcgatggctaatgctgctttcatgcgcatccctctagaaaaagtagaaatttgattatttttaggtaattcaaatgattgaataagattgaaaaattgatcactattccaatgtttaaaaatatttaaaaatactttatcaatctctgttattgtcaatttattcggtacacgtaaatcatcaaaaactacacccacgtgttctttataatctttatctttttcggaaataatttgattgaaaaaagaaatctctcctgaatctttaaatcgattacccactaatgtgttaataagtgtggatttacctgatccatttttaccaattaagccaatgacctcacctggatttaaagtaaatgaaatatcatttaattcgaaatttgaattcttatacgatttattaagttgttgtacttgaagtaaatgtgtcatctaatgatcctttctttatagaaatgaaaactatgaatgataaaatttatatgtttttaataaatgactaaatccattataaataaacaaaatgattaaaataaagatccctaatgtttgggaatggccagtttctaatgaataaaagcctaaaaatattgcaccaatcataattaaagataggttaatatagaatgttttgaacaaggagttaaagtaaatatgtcgttctccttcatctaaaatattaattaatttctcagcataatttttttctcctaatttgggatagcgagaatcaaatttacgataaaataatcctgtaattaccgaggaaataatcgttgtcataaaaggaagtaatgcccaactactagcactagaatttccatttcctaagacaatgataaaaagagcaataaagctaattgttaattctagataataaataaatgaattttgcatatatgctaaattagctttcttatcatatgaatccgcctcatcttcatcaatatgtgtttcggataaacgtttgtaatgaacggcctttttttgaatcataattaaatacatacttaagactaggataagtgccacacagattaatgagattaaaatgacatttgaatgtgtagcataatgataatttccaaagaagtgaaagctatggttgtagtcaatgaataaagctatacatcctccaatcagtccgccaattaacaaagtgattataaaacgacctattttcataaatcttcctcctcaattataaagatagattcaacaggttcattaaaaatacgagctatttttatagcagttaaaatagaaggtgtaaagtcatttctttcaatgagagatacagtttgacgtgagatgcctgcttttttagcaagttgcgtttgattataaccttctcttgctcgtaattctttcaatcgatttcgcaatcatcatcatctcctcacaatcagtgtatattatcatagtcattttgacaaatatatttgtcaaaaagtatctaaagtaaattatgggtaagactaacgattgtctgatgttagacatccggatgtctaaagcgtcttactatttaatcttatccactgtgtaatgtcttcaagattataaagcttgataatatcttgatatatatcgtctaaatttatattagaaagtgtagaaatcaatgtatgttcaatatgatttaaagctatactgatgttacattgttgtgctttgtgtcctgctttttctcctaaaaagttggtaagtaaatgttgacttgagaagatattgccacgaccttcaatagctaaaaagacatcgtaaaaagtaatatctttgagtttttttctaagtgtaaatcctccatttttaccagttgttgaatataccaaattttcttttactaatgcttttactattttttttaagtaagaatcagaaactttaagtcgcttgcttaaagcggtagatgtcattactgactgacgagggagttggtttaaaattaataagacatatattgcttgttcccaaccggtagataatttcatatataagcctcctatcaaacctattatataatatttttatattatatttaaaaaataaagtagttcctatataattgtatttaaagacaaaatatatctcaattatctttaattaaaaatagggagacgacagcagtgaaaaaacatttaaatacttcaataacattttatatgtccattctttttacgactatttttatgggatcatcttttccaactggcaaatatttaatttcaaatgaacatgttccacctatgcttcttggtggatggcgatttgttatcgcaggatgtatgatgttaatccttacatttatgagaaatggggaaaggggcattctacccacaagtaaagggaatagttataaaggatttatattagtgttcgttattggatttttacaaacagcagggacgatgggattattaaattttgcaatggcatttggcgtgtcttcttctatatcatctattctattatttacgaacccgctatggctggcctttttagcacattttattttagatgaaaggttaacaaaaattaaaattacttcacttatacttggtgtgtttggagtaggattatgtctcggattagatgaaatattatttggatgggggacgctttttgcactagctggttcattatgttggtcaatcaatacaatagtgacaaaaaaggtagtgtttgataaagggccctgggttttaacaggatggcaactattattcggtggtatgtttatgctgataatgagtctcgttttaaaagaacattatacacttagttcgcttaatcattggggatggatatggttcttttggcttattattccagcttctgtaggttcatttggattatggttttatagcttaagccaacgaggggcaactacggcgagtagtttcttatttttagtaccactattttcgacactattttcaattataggattaagagagcccttcacgcttcatttaattttaggaggtttatgcgttgttgtggcattaatgttaattcatcgtcaaccgaggaaaaatgttttataaaatacaatattcaatacattgaatataaatacatatattaatagaaattagattatataaaactttagttaagccttttgaaattgtcttacttttaacataatgaaaaaatatgaaaacttgtcattactatatttttgagaaataaaaaatttaaaaaaatctcttcacagagaatgtaattttgtgtagtatatctttcatatgatttttagagagaaaaaggaggaaacaataatgaaagataacagaatgatgttcttcatatttatgttaggtacatttacagttggaatggcagaatatgttgttactggtttattaactcaaattgcaagcgatatgaaagtgcctatttcgagtgcagggttattaattagtgtgtatgcaattagtgttgcattaatcggtccattaatgcgtgtatttactttaaaagtgcgcgcacaacgtttactcccagtattgatggccatttttattataagtaatataatagggatgttagcaccgaattttccaatattactgttatctcgattattgtcagcctctatgcacgcgcctttctttggcgtatgtatgagtgtggcggcagctgttgcgcctcgtggtaaaaaaccacaagcgattgctctcgttcaagccggattaacaattgcagtgatgattggcgtgccattcggttcatttttaggtggatttgcgaattggcgctttgtctttggcgtcatgattttgttagctgtcattactatgttaggaatgatgaagtttgtacctcatgttgtattgagtacagaaactagtgtgaaaaaagaattaaaagtatttaaaaatccacatatcttaattgtaatggcaattattgtctttggttattcaggcgtattcacaacttatacgtttatggaaccaatgattcataaatatgcaccatttggaattgttggtttaactgtatgtttatttatgtttggccttggcggtgtggttggtaacttgcttacaggtaatgtaccagaacataaacttacacagtacttgttctatacctttgtgttattgtttataacgattgttttatttgtaacagcagtgcatagtgcgattttagcaattattatttgtttcttatttggtttcggcactttcggtacaacgcctctattaaatagtaaagtgattttaagtgcacatgaggcaccgttacttgcaagtacacttgcagcttcagtctttaatattgcaaactttttaggtgccattgtggggtcaatactattatcaatgggattcccatatcttacgattacatttgtatcaggcgggatcattatcttaggaattataattaatacaattaatcatttgtatgaaaaaaagtatgttacatttgatcattaatcaaaagcgttctaaattgagtgaattcaatttagaacgcttttttataaaatgtaaaatgaatgttaaataattaccttaaaattgacaacttgaggaatataagatacgtcgtgttgcgtcatataatcaattaatacttgtgcgccttcctcttgaatatctttaacgactggcgcttctgcaaacattttataatctccgcctccaactgcacgatagttgttcacacatatggtatacgtttttgtgtcttctaaaggtgaagcgccgactttaatatctgaaacacgttgtcctacaggtgcaccagcatgaatggtataagagattcctccatacatatcataattaaaatgttgaggttttggagataaaaatgtgtcactgactgtgatttcattattgtcatttacactaaaataacttgctgatttttctaaagcgtctttaattcctttgccattaagttctaaaacttgaaatgtattaggaaaaggatagttattaatgatatctcgcattgtgacttgttgattaaagcctttagctgaatcaaatagcgcagtacttgctatatctgcaccacctttttctaacaaaatataatttatcagattaataagtgaatgagggtgtgttcgagcttcgaactgatgagtgactagcattggttctgataatgttgtaatgtccgtatcaagccaatcttcaagttcatttaaaagtgaatgatcgttgttagataatgttaatgaaagatgagaaggcacagatacaagagtgctctgtttatctgtaattcgatgttcatgatctaatgttaatgtcaccttaccaaattctgtacctcgtgtacctggttggataatggcggtgtcattttttatcattgcaatatcacgatgttggtgtcctgttataagcacgtcaatatctttatggaaacgttctagtatatcagatccttcattttctccagttaattcttcagtaggtgtattagtatcaagacttttttcaaaaccgccgtgataagacacaacgacaacatctgattttttacgaacgtctggtaaaatacattttaatgtctcaactgcactgttgaacgttaatcctttaatatgggcaggttgttcccaatttggaatgaattgtgttgttaatccaatgacgccaatagttatatcgccacgtttaaaataatttacgccttgaccagtcaaaggtgcgttattgtgatcaaaaatatttgcacacaagatagggtgatgaagatggtttaaagtattttgtaaataaggtaatccataattaaattcatgattacctaatgtaccaaagtcaaaattaagacgattataaatatcagtaagaggttgacttgattgttcttcagttgctaggtaatggcataaaggagaaccttgtaaaaaatcaccattatcaattttaaaactatagtcatcgtgttgacgttcttgttcgatcagttgatttacttttaataatcccataggaagattttggtttctttttgaaaagtcagtgggaaaaatgtagccatgtatatcacttacgatataaaaagagagttgtgtcataggtcatttcctttcataaataaagagataaaaagggaagtagtttattgaacgccacatacctttattatctcttacgtgttgtattactactataaattattgaattgaacctgtagcaagcgttttactaccttgttttaaacggatattcacacccgaaataggttcagatgttttagctgtaaaagttaacgttgcgttaccttgatcatcagtggttacactttgttcttgactatagcctaccgtatcataagtttgcccatcttgagaaaaacgtgcaagttgtctaccaccatcttgataaatacctaattttaaatgatcaatagttgtatttttagccatgtttgttaattcaacttgaatattaaatggttgattcactgatacattatctggtaaatggaattgaacattattgctagaaatcattgaattagaagtagttgtatcttgggaagactgtgatgtattcgtatcctcttgtgaatgattgttttcagttgtattgtcttctgtactattcgctttgttattatcattatggctaccatgatttctatgtttactatttagttgtgatgatgtactgccataactacctagtttaaatgttgaacggtcataccatttataaccagttggaggttgtgaccatggttctttttcaggttcagttgaatgttgtggttgttcaaagttaagtaatggtgttggttgatctaacttaatacctgtttcttttaaattcggtgtatgatcttgttttccaaaccaagttgtaatatttttaagtaatttactattatcttgttctttaaacccatcatacgttttcttagttcttccattatcttcacgtacatatttaggtgtactatcttcgactaatgatgaatctccaatgaaggctgcttttcctttgcctacttttgagatagcaacataaggaccctctgcgataccaccgccattgtaaataccttgatcgactgcatgagaccaacgttgtttttgagacaaatggtctggtaagaagataataccttttgcttttgtaggatctgtaatggcaagagttgaaccagcatgcattgatacagaatgtacaccttcagtaataccaaagctgtcactggatgacacaatattttgagtgtttaaatcacctaaagcgttgtaacggaaacgtacaccgaagtgttcagaaagccaatctgaacttttaacatttcgcatagctttagaatgtttttcctcatctgttaaatctttggtgatatcttgatatgcaccacgacgataaccattcatcacttctgaagaatcgaaacgatttaagtttctgtctgcattataatgatcagcgataaagatgatattgccacctttttcaacaaaattaagcatagcttgttgttctctctttttaaaaggaatattggcttctggaagaacgagaatattgataccacgtagtgtattaggtgtaatattagattctccatcgatttgtttcacagtatatccttgttgacgcattgaatcagcataatcggaaaagccaccgtcaatgacccaatcagcagctcctgccgtttggccgtgtgaagcgtcaaaagcgacagtttgagtggtagtttgatttggtgcagcgtgactgattggcgttgaagataatgtaattgctgaagctaaaatagtactacttaatacttttatccatttcatatttttatctcccaaatatattttttaattgatttataaaaaaagtataataaaaaaatgagtcgataatagattgtttagttaatatttaaataaattttacaattctttaacattgtaaaacaattctataaaaaattaacacataataaatattattttggttaatattgtgctactcttaatattgtcaaatgaaatgcgttgacaaattacataaatgtatacatagcgaacgggggcaataggttatgaagcaattgaaataccttttagtattagcgctatcagttattatttttgcagcagcatgtggaaataatagctcgttagacaataataagagtagtaattcggatggtggatcaggttcaagtaaagatggctatacacctaaagaattaactgtacaattcgtaccatcacaaaatgcagatacacttgaagcaaaagcaaaaccgcttgaaaaattattatctaagaaattaggtatcccagtaaaagtgtctgtatcaacaaattacaatacaattgttgaagcaatgaaatctaaaaaagtagatgttggtttcttaccaccaactgcatacactttagcacatgatcaaaaagcagctgatttattattacaagcacaacgttatggtgtgaatgaagatggttctaataataaaaaacttgtaaaagattataaatcagaaatcttagttaaaaagaattcaggtattaatagcttaaaagatttaaaaggtaaaaaaatcgcattacaagatgtaacttcaacagcaggttacacattcccaatttcaacaattaaaaaagatactggtattgacgctactaaagatatgaaaatcgtaaacatgaaaggtcatgaccaagctgttatttcattattaaatggcgatgttgacgctgcagctgtattccaagatgcacgtaacattgttaaaaaagatcaacccaacgtatttaaagatactaaaattcttaaactaacaaaaccaattcctaacgatacgatttcagttcgtcctgatatgaacaaagacttccaagataaacttaaaaaagcatttaaagacatctctaaaacaaaagaaggacataaaattattagtgaagtatactctcacgaaggctatacagatgctaaagactcagacttcgatatcgtaagaaaatacgaaaaagaagttcaaaatatgaaataattttcacatagacagaactaaataagtgataaagagaagaggctagggcaattgagtcatataagaaatgcatatatcatttcttatgatcttgtcccgacctctttctctgtattaaaaagaagggtgtaaacatacatgagtcagatagagtttaaaaatgtgagtaagatttatcctaatggtcatgtggggttaaaagatatcaatttaaacatcgaaaaaggtgactttgctgttatcgtaggtttatcaggtgcggggaaatctactttattaagatctgtcaatcgtctacatgatattacttcgggagatattacaattgaaggtaaatcgattactaaagctaaaggtaaagaattattaatgatgcgtcgtaatataggaatgattttccaacattttaatttagtcaaacgatctactgtgttgagaaatgtattaagtggtcgtgtcggttatcatccaacttggaaaatggtattaggattatttccaaaagaagacaaaattaaagcaatggatgcgttagaacgtgtaaatattttggataaatatgaccaacgttcagatgaactgtctggaggtcaacagcaacgtatttcaattgcacgtgccttagcgcaagagccagcgattattttagcagatgagcctgttgcatctttagacccactcactactaaacaagttatggatgacttgaaaaaaatcaatgaagaattaggtattaccattttaattaacctacactttgttgatttagcattagaatatggaacacgtattattggtttacgtgcaggagaactggtttatgatggtccggcaagtgaagcgaatgaagatgtatttaatgaaatttatggccgtaaacttaatgacgatgagaagctaggggtggagtaatatggcaacacctactacaagtaaatatgatcaatatttaaataaaaaattctctttcaaaactagtttaactctatttttagtgattgcgctcgtagtgtggagttttttatatacgggctttagctttagtgacttaatggtaggtattccacaaatcggttctttctttggacaaatggttccaccagattggagttacttaagtaccattacaaaacctatgttagacacaattcgcatggcgattgtaggaacattcttaggatccatcgtatcaattccagttgcattgctctgtgcaagtaatattgtaaaaacaaaatggattacggttccatcacgttttattttaaatattgtacgtaccattcctgatttattattagctgctgtctttgttgcagtttttggtatcggacaaattccaggggtattggcattatttattttaaccatttgtgttattgcgaaattattctatgaatcgcttgaaacaattgatccaggtccaatggaagcgatgacggcagtaggtgcaaataaaacaaaatggattatgtttggagtagttccacaaacaatgtctacatttttatcttatgtattatttgcatttgagattaatattcgtgcctcagcagttcttggattagtaggtgctggtggtatcggtttattctacgattcaactttaggattattccaatatccaaaaacagcgatgattattctgttcactttagtcattgttgtcattattgactatgtcagctcgaaagtgagggaaaaactcgcatgacacaagaacagcatcagttagaaaagaaatatccagtgagatcaaaggaacacaaacaaagaatgattaaacattggcttattgccattgttgttttagctatcattgtttggggttttgcaggtatgcctgctttagaattaaaatctaaatcaattgaaattcttaaatctatttttaatggattattccaccctgattgggattacgtttatattccagctggagaagacttacttcgtggtttacttgaaacgtttgccattgctgttattggtacatttatcgcagcagtgatttgcattccattcgcatttttaggtgcacgtaacttagtaaaagttcgaccagtcacagggattactaaattcattcttagtgtgattcgtgtattccctgaaattgttatggcgttaattttcataaaagcagtaggtcctggttcattttcaggggtacttgcgttagggattcactcagtagggatgttaggtaaattatttatagaggatattgaaagtttaaacttctcttcagccgaggctttaaaagcaagtggtgcgaataaaactaaaacacttgtatttgcggtgattcctcaaattttaccttcattcttatcccttattttatatcgttttgaattaaacttacgttcagcatctattttaggtttaatcggtgctggtggtattggtacaccacttatctttgcacttcaaacacgttcatgggatcgagtagggattatcttaatcggcttagtgattatggtagccattgttgactttatctcaggagctattcgtaaacgtattgtgtaatagaaaatataatttgaacatttttataaacaaatagagctattgccagaacttagaaaactggacaatagctcttttataatgcatgaaagaaatgttgttacagtattagtaacagatacttagaaaaatacagttaatgttttttaggaataacgcgtctaaagctaatacttctaaggttagtataagagtgaatatgctaaaatcattatattttgaagtattagtgtcatattttttagtaaggggtgttactaaagaatatgtaacgttatttaaggattgtgaatgatgataactaagtgtaggttctgtttttaaataatgcggtggttcattgatgtgtgattcgatacataagtcgtgttgtcagagtaacgtgttgttttaatagcatttaatttagtatcatggagttgaatcgtcgttgttcgctgtttcattaagttctgtttttcaacataactattaaaatcgttgtcattattttctagggtgtctttacttcatccattttcctctacaagactattgaaaccgatacttgttttcagatagatttcactgttgggctgaaacatgataaaaacatgtgtgttgattctaacggatgacgggaatgtgattcatgttatagttaataccctgatttatgttgtaatcatttctaggtgtaatgagtcatttgttttggtcatgattaattagtattgttctttgaagcaataagctgatgaggtatatgataatgatattgttaatcaatattctgctaggatgtgaaaaaatgaatgaagatgctataagtgttgtaccgaatacctatttaaagtgatgtatagtcaaagctagttagttcttagtaatgatcattctatatacataaagataatgattttatttttcaaaaataaccataactatgtacatttataaactaacatatttataaaaaaacaaccttaatattccctatcatctatatgacagttttgtcatacacttaaaagttgataggataaatcgctattaaataaaactatatgatgacattgaaaggatgttgaatatgaattttcaaaatgtagtagcagatgatttagaaaggttaattcaattagaaaatgaagggtttactaaagaagaagcagcaacaactcaagctttaaaacagcgtattgaaatcattccggatacgtttattgttgcagaagaaaacaatcaaatcgttggctatattaatggtccagctatttcgaataagtgtattacagatgatttatttgcatcgattagacccaactctaaaatgggtggttatttaagtgtactcggtttagttgtagcgaaagattttcaacatcaaggcattgcaggacaactgttaaatgattttgagaatatagcaaggcaacatgcacgtttcggagtcactctcacttgtcgtgatactttagtaagtttttatgaatcgtatggatatattaataaaggattatcagattctaatcatgcaaatgtagcttggtataatttagtaaaagaattataaaaataggggtgatacattggaaacagtatatctagctggagggtgtttgtggggtgtacaagcatttattaaaacattgccaggcgttatagctactgaagcaggacgtgcgaatggaacgacgcagcgacttgatgatgaatatgatggctatgtagaatgcgttaaaacagtttttaatcctgacatcacttcaattcatgatttaatgcattatttatttgaaatcatagacccatacagtctgaataagcaaggcgtagataaaggacctaaatatcgtacaggtgtttatagtgaaaatgagaaccatcttaaagaagcacaacaatttattcaacaacgttcagatagagataaaatcgttgtggaagtacgtcctttagaaagttatattaaaagtgcagacgaacatcaagatagattagataaacatcctgaagatatctcgttatgtcacatctctaaaagtattttaaataaatacaactaaaaggaatgggacagcattcttatcgtattcgttgtcccatgtgcgctttattatttcttagaaaatgtatcgataagactaagtgcagctaaacctaataaatctaaagcatgttgtgcgccaaccttaccatgacctgcctcaaggcgtttatatactgcaacgcttaatacactaaacgtgacaagtgatcctaagcgagagatatttttatgcaagacacttgtggcaaacaaacccgatgcaatgaactcaatcacacctgctaatttcatagcacgttccgataatttaaaatcctgtgtaaatagttgtttagtataagggttaccagtaagtttacgttttgaagcggcatacaaatctttagcgagttttaaattggtagcataacgtaatatcattatctaaacgctcctttatattatattttttagttaaactaagtataaaagtcacgttaaaaaaagttaaataaaaacgttcagcataaatgtgtaatgcattcacgctgaacgtttttatttatatagttattgaattagtttttaccgaatgtatcagcaaaacttaaagcagctaagccaagtaaatctaaagcgtgttgtgcgccttctttaccgtgaccagcttcaaagtgtttgtaagctgcaacgcctaatacaccaaatgttgcaatagaacctaaacgagaaatatttttgtttaagaaacttgcagcaaataatgcagcagcagtagcttctactgtacctgctaatttaactgatttttctggtaaaccaaatacatttttaaatgtatcaatcatttcttggctaccttgtaattttggttttgatgaatcatataattcttttgcaagttttaaatttgcagcataacgtaagatcattaataagtactccttttttagttaaattattttattataaaataagtataatttttatactagaaattatatgattattggtaagtaaagtcaataaaaagcgttagataattatctttttataagaaagtgttaatcagtacactttagaaacgatattgaacgtgtcataataatactgttgtgacaaaatctatgaaaggagttatattatggaaacatcgatgaattataatcgaatgactacaattttctttatttcgggtattattgttatggcaagtttatatactgctttaccccttacttctgtattcgcaaaagattttggcatttcaaatgctgttgcctctctaaatggtgtgatcttttcaattacgtattcactaagttgtctattttatggtacaatttctgaaaaatttggacgtattcgtacgattttatttggacttattggactcgtcatcatatgtttacttataggcttcattcattcgttcacactatttattattcttcgtgcaattcaaggtatatgcgcggcagctttttcacctgtatctattacttatgtcactgaaacgtattcaccagtgaaacgtgtgactgcgattagttttattagtacaagttttatgttatctggtgtcattggccaaaacttgagtgaaattgtagtacgttattctaattggcatatggtttattttatattaacgttactttacatcttcatagcagtacttatatataaatatattccagaaagtccagtgaaaaatcctcaactcaaactagtaggtttctttaaaaactttaaagattttaaagataataaaatagtcatattatgttattttatttctttatctttacttaccatgtttattagtatgtatacaatctttaatcattatattacttctgatattgtgggtggctcggaagcaacagccattaatgctaaactctttggtattattgggatgttactttcattattagcaggacgtattagtgatcgtacaggagttaaacatgttatcgtaggcgcattaattgtcagtatcgtttctcttattttaatgggcttcactacaaatgttattttattagtgatatggagtgtattatttgtaggaggtattgcgtttgcaattccatctactatttcaaaagtaggtatggttgtcaatcgaaatcaaggtttcttcttatctgttaatacctttattctgtttttaggaacagccattgcgccattattgatgattcttattcaaccattatctaattttacattacaatttataatgattgcggtcattggaatcatcgctcttatagtcgctttacttttaccacgtaggaaaaatgtaatacgatgacattgtggtatcaaaagcattcaaattcaaaatgagtttggatgctcattttttataagttgagttgtcaaattaagtgcaacaacttagaatttaaaagttcataggacatcttccaattaagacactttctaggtcgatggttaatagagatgcccactattcctttccattaaaaaatgaattaaacaacgtggagtaacctacttggctagatgtcttccatttataacttatgtagaagtagatggacatgttatgacaggacaaaactcataatctgcttctcaagtaggacgcgaagtcaaagcattattagactatttacagtttaaagatatatctaaaatgtcatgcaatgtagcaaaaatctcatctacactataattgtaatcattttctacccaacgtcttaagacctctatcatgccgctactataaaaatctgcaataatttcaggatgatgactgtgtttaatttttaaagcaagtggatcattttgactttttacgctatctaacattaattcacgacttacatgcgttagattgcgaaagacgtccgcttgacgagaagaggtcagtaaatgtttaaatactttcttatgttctccgataaaatagatgaattgttgaaaggattcttctgtagaaagaaaaggtcgagtatcttcatgatgaaattcagttgcgatatagtcaggtaaagagaatagaaggtcatatttatcttggaaataacgataaaatgtactacgattaatttctgcgatatcacaaattttttgaattgttatttcgtcaaaatgataatcttttaataatttaaatacagttgcgtttatatgtttgatcatacgcttttgattggcagtaggcataattcgaaaatgctcctattaatttttttctaggtcgaagtttgacttattaaaagtaaagtatcataaactttagaataattccaaatatacatctttaatatgataataaaaaagtgtgacgatagaatagttaatgttcttcgccacacttaattgtcaaataaagtgtcaatttaatatttatttagtgtcgatatcgtttaaccaatcatcaactttgtgatcatgattgtctacataatcttttgctacttgttcagggtttttacttttaacaaagatgtttttagctaaacgttcctcatctttttggtcccaatcttttgcaatacgtgttgcaatgtcatatgccgctggatgtttttctttaaaattatgattgaatactaaatcaatatgttgcttattatttccataaattttgtctggatctttaagcattttgacatctaattctttcgagaaccaatttggttccattgatgtgaaaagaataggttgttgttgttgatatgctttttgaatttttttgaattgttcctgatcggaacttttatctaggctatatttactcaaatcgtctctatctaattcatcattcgtttgttgcataacaccatttctgttatcagtaccttgaattgtccaatctacagatttaccaaaatctttatcatcttttaaatctttaattgaatcaatgttctgaacatatttaggtactgctaatccaacattaacatgatcaattaaatgtttgtcatcatataaagtaagtgtatctttaaatttatcataatatcttttatctgtttctggaaaaatacctgaagcatgaaatgcatcatcacttgcagacactgttgcatataatggtccacttgctggcacaggtgtagttgtaacatcataaccagctttctttaatacttccgcaatcacaagtgaacgtgcagttgaattatcacttgcaatataagggatttcaatcgttttgtctcctaattcgattttactttgtgtagaggagttggattgactattcccacaggcacttaaaactatggctagtgtgagtgtggctaatagtactaaaaattttgatacgcgtgatttaagtatcaatatctttcgcctccctgatcatcttttctattgtctgtatgactcgtttgatatttatcgtaaacatgttgattatgttcgcgggcataaagcatcaatgctttaaataatacatcctgctccgtattattatcagttaaatctttgtataggtgtgtggttttatcaaaataagttgtagtgtcatgctgttcttgtcgcttagaatgaaccgtttcaggtgtaccttcttcggtatataaagcttcgtaatcaacatcatcatatgcattataattattagaatgggtagcatagctgcgattttgatgttgataagatacatcttgtgtatcaacgaattctctataacgagggacctctgaatgtttgtaattagaagtagaagattcatgatgttcttctaatgctttaccttcaacatcaattttaggtaatataacacctaaccatttcggtaagtaccaagatgcattaccgaataatttagttaaagcaggaattaatgtcattctgacaataaaagcatcaaataatacaccaaatgcaagagaaagacccattgatttaattgcagtatcatcttggaagataaaggcaataaacacactgaacataattaatgcagcggcaacgataactggaccactttctttaatacctacgcgaatagagtgatcattatctccagttttgctgtattcttcatgaacacgtgtcattaagaataattcatagtcaatggctaatccgaataataaaccgattgtaataacaggtaaaaaggcaagtaatggacctgtattgtctacaccaaatagactactcatcacaccatcttgcatgactaaggttgtaaatccaagggttgccattaatgataagacaaatccaagtactgcttttaatggtacaaggatagatctaaatacaatcataagtaaaataaatgctagtataacgataacgctagcgaatactgggatagcatcattcagtttttctgacatatcgatattaatgacgctttgaccagaaatctcagtgtcataatgatatttatcttcggcatctttgtgataatctctcaattcatatacaagatctgtggtagatttagcgtttggaccttcatttggaataatcgtaaagatagcatagtgattattaccattcaattgtgctttagatactgtatctacattatctaaatcttctatatctctacgcatattacttaaatcattttcaattgatgttttacttccaccatctttagtattcactaacattacaatttgtccgttatagccttcaccaaaattatctgaaatcagttgatacgctttatgctcagaagaatcgtttggtttaagactgtcatcaggaataccaagacgcatgcctgtgattggaatgatagctagaataagaatcactaaactaataatcgttgcaagcacaggtttacctacaacgaatttagcccatggatgatgtttagggtctttatttttagtaggcttatttttaattttaatacttttatggaaaatactaattaatgcaggaagtaatgttaaggctgctaaaacagcgaataacacactaatagctgaagcaaatcccataattgctaagaaatcaatgcctactagtgataaaccacacactgccatcattactgtaataccagcaaagataacagcactacctgcagtacctactgctttaccaattgcttctaccgtggcagtacctgattttttaatttctttatatctaaatagaataaataaagaatagtcaatacctaccgctaagccaatcattacagctagtgttaatgtgaagtttggaatgtcaaacataaatgtaagtaatgaaatcataccgacacttgttgctaaaccaagaatcgcactaataattggcatacctgctgcaataagagagccaaatatgataagtaaaataatgaaagcaactacgatacctactatttcagaaaaaccaccaggttcagagcccattgacataccagttgttttttcaatttgaatgttgtgattatctttaatatcttgaagtgctttatttactatctttttagatgaatcttgcatacttgtttgagggacaacatagctgatattagcaatagctgtatcgccttcactattgacctgtcccgactcatatggattagaaatgttttgtatataatcatcatcttgtttaatattatctaaggcatcctttatgtcttttttcgttgttttatctttcaatccatcctctttatttgaatgaaagacaatcttcatggacgctttttcactgtcttgatgaaattctttactgattttatcattcgtatcaatggattttaatccattcattttgatatcactatcaaattttggtgaagtaactaatagaggcgcaatcactacaccaagtacgactaaccatataataatacttagccatttatgcttagcgataaatgtaccaagtttatataatagatttgccaatataatacctccttttattgttaaaatagcgttattagacaatgtacgttaatagaacgtattttataatttaacaagagtttgattatatgtgtaccattaaaaaatttaagacgttggaaaatgcaacattttattaaaattgttgtttttttatagaagaagtgaggaggagcataaaaaagagaaggataacattcatttaaaattcgttatccttctctttatgatatgtataaatttaagctacgaaatatccgataagacaaattgcaccaatgagtacaaataaaacgccaggtaaatatattttttctctaagatcaatatcttgtctatatgcgacgaagctactaatagagatgagtatgataccaactactagtaaaataatagaaagtataagcatcaactcagcctccttcatatcaaaattgatgaaaacggtgttctcttaattttattatattaggaacagacaaatttttatagcgatttattaatataatgtaaaaatgttatcatttttatagttatttattaataaaatttataataaatttacatttaataaaataattaaaaggagtagaaaatgaattctacaagaattgttttctactcctttgcttatataaatgatcttttcatctcattgacgtctaaatactttcattttttaaagaatagattaatgtcataaagttttgaataagagcagtgagatgatgatctgcccggtaaacgatagagatataacttgaaggtgggccttcttttaatgacttgccaataatattaggatgatagaataaggtgctttgacttacaagactcagataattagaatctttaataatggttaatatactactaatactatttgattccatatgaacatttaaatcaataaaattgttttttcgccaatcatcaatactttctcgtgttgaaccactactatgaataatgaaacgatacgcatttaaatcttctaatgaaatatctgtttttgaagccaaaggatgtcttttatccattgcgataacaagtggattttcttgaagacgtttcactttcaattctttttcattgaatcctttttctgaaataacgccgatatcaatctctctatcttttattttctttagtatcataggagcagtatctacaattaaattcatatcaatatttggataatcatgcatatatttttttaaagtggtaggaagaatactataaataggtgcatgacttgctccaacgcgtaaagtcccacgtttagattgtttgaattcttcaatcatatgtgttgtttcatcaattaaatttagcattttattagaattacgataaagtaagtctccagcatccgttaaattgaaacatttaccttttttaaaatataagggtgttccaagttcgttatttaaattttttagatgaaatgttacagttggttgcgttatccccagtttttcagcaacagcattttcattctgcaattcaacaaaatttttaaaaatcatcatttgttttgtattcataaattaattccccaaaatatataaattttttctattctattatttatattaaagaaagaattttgagtttacgttaatacattgtttaaagttagttaatgttgatacattataatggaatatacaatattatcagtagaggattgaataaaaattttgttacgctctcatgtattaaattaaaaattgagggtaataacaatgttgcttaacaaatcctacaacataaagcatttacatttaaggagagatttacatgtcagaaagactacttgtgatttctgatattcatggacatcgaaaagccctttccatacttttaaaacgagcaaaatataatcccaaaaaagatcaactcgtacttatgggggattacgtcaataatgggccggattcatttggaacattaaaattggttaaaaggttaaaacgacgtggtgcgcttgctttagcaggtaatcatgaaatgcgttggttaaatagtaaagataaaaagattaagcgttggcatccgttcttacgtgaattatctgctgttgaagtgattggtaattatatttttgcacatgcaggaatagataccaataaacctttgaataagcagattaaagaatatactactggacattattcacattcgcttaatcgtcagattcctaaaaataaatatttagttcatggtcatgtaccgaatgatcgctatggattaaagaaagacgagatttataaaaataaaaatgaattatctatagatacaggcgcaggacacaataagtttttatcgctgattgatttaacaggtcaatatcagtattcagtagaggtagcgaatattcgaaaaatgaatataaaacgcttaaaaatataatagttaatgatgtttaatctttgattaaaacgaataaataaaaatataataagacattcaagttttatgtaaaatgttatataatgaaatggaatatcactaaaaaagggtggcattaatgaataaaaatacgcaaaacaaaaatcgtaaaatgtcgaagctaagttcgtatttaaaagtgtcatgttcagctttaatattaagtagttcacttgtaggttacgggtttacgaaagatgcatttgcagcaacacaagatgcagaaacagcaacttctgaaactacaacacatgttcaaaaagatttacaagatgcaatgaataaagcgaaaaaagacattaagcaactaaaacatttaagtgcagttgagttaaaaagttataaagaagatattgaaagtgctaaaaatcagactgaaattaaaaatataatcaaagaagcgaaaaaagaaaataaagtaacagcaaaagaaaacacaacagacgtttcaaacaaggataatagcactgaatcatctagcactcaagatgcttcaacagaagaaaaggctacaacaagtaacgacacttctgatgataatacatctaatatatcaagtgaattagataacattgtatcagatctagatactttatctaataaagttgatagcggtcaacataaagatgcaacaacatcaaatgaatcttcgtcttctgaatcaaatacttctgaaaacacaactgatgaagtaacgaaagaggaacctactacggaagaatcaccaaaagaagtgccaacaacagagaaaccttcaaaccaaacaacctcttctaaatcggaaacttctattgttgataaattagatagtattaaaaatgatattgatagtgctaaaaaagacatcgaaagttcaaaagaaaacgattcaaatcaattaccaagtgatgaaaatagtacagaagaggaaacaactgaatcatctagcactcaagattctccaacaacagaagacacaacacattctaattccaaccatcatgtattagatggattagctaaattaaacgatactcataaagatcaagacttagatacagatggacgatatcatcaatttgataaagtgaatcgccaattatctgaagctgaaaaaattaatcaagctattgctaaaattgaaaatagtaaagatgatgccagtcatttatatatcaatcgtaaattagatcaattatctgatttacgtgataacattcaacatcaagctgatttagcaaaaaaagataaacaagctattgataatgacattgaaactgtacgtaaaaatatagagaataaccgtgatattatccttaatcgtttgcaacaagcgtctgacaaacaacgtgcagctgaagatatattaaacagtgtatttagtaaaaatgaagcgcaacacattttgaaaaatattaaaacaaaagagcagtctgacaaacaaattgcagatcagattatgaaacaaattgatggattaacttcaacaacaagtgatgacattttaaaatctatgttagaacaagctactaataaagaggatttattaaaaacaattttatctacacgtttaggccaaaatgaagcggccactattgcgaaacgattagtaaatgaccatttaacaaattcacaaattgttgatcgcttaaaacaagcatttaatcaacatgggcttgtgtctagtgatgatattttaaatgatattttagataaaacgtctaatcgtaaacaagccattgaaacaatgttagcaacaaaattaaaccaagcaaaagcgaatgttttagctgatattatttcaagagtacaatctgataaagcgaatgctttggatttagtgaaaagtacaattaacggtaaagccaatgacttattacaacttcaaaatagcttaggtcaagccaaaaatagattaaactatattcttgatccaattgtaaatcgaccatcattattagatcgtattacgggtaacacaagtggttccaatctcggttcaaatctattaggtaatggattggatttactaggtggtttaactggaagtcatttattaggcaatcttccttcaggtagtagtttgcttgatggattaacaaatggaaacagcttacttgacggtataagtgatattcctaatccaacacaaggcttatcattaggtcatttaggcgatgatggtttacttagcggtttatttaatagtgatggaaatttatcattacctgcaacaggtgaagccattaagaaaaactggattccgattgcagcagtgattgctattgcaggcggggcacttgtatggttcagtcgtcgtaaacatcacaaatctaataactaaaccaaataaataggagtaaataattaatgccattgaccattaattatttactctatttttatatgttgagttgttgcacttaaatggacaactcaacatatgtaaaagatgtatccaaagtatgaataataatcaatttactttacatcatcattgaatgtcatatgcattagacataaacttaaagtatgaaaaaacaatttgaaaatgactcaattgtaattatgacgtagtacatgttgaagtgattaagattaaaggggtggggggcatggaacacagtgaaggtgtatctcatacagtatctgataacaaagagaaaaaacggtttcgattaaaaatgcctggtgcatttacaatattgtttattttaaccattattgcagtgttagcaacttggattgtgccagcaggtgcgtattctaagctttcttatcatgcaagagcgcatgaatttaagattgttgatgcacataataaaacaacgacagtcccagggacacaagatgaacttgataaattaggcgtcaaaattgatgtgaatcaatttaaatcaggtgctatcaataaacccatatcaattcctggaacttacgagcgcttgaaacaaaatccagctggcctcgagcaaattacttcaagcatggtaaatgggaccattgaagctgtcgatgtcatggtatttattcttgtgcttggtggtttaataggagtcgtacaaacgagtgggtcttttgaatccggattattagcactaactaaaaaaactaagggtcatgaatttttactggtctttatggtatctatcttaatgattttaggtggaacattgtgtggtatagaggaagaagcagtcgctttctatccagtgcttgtacctatatttatagcgatgggttatgattccattatatgcgtaggatctattttccttgcaagttctattggtagtacattttcaacagttaatcctttttcagtggtaatcgcttctaatgctgcaggaacaacatttgtagatggattatattggcgtatcgctggactcgttgtagcagccatctttacgattggatacttatactggtatgcaaagcgtatcaagaaagatccaaaattatcatatacttatgaagataaagtgaagtttgaaagacaatggtcagtgattaagaataatagtgaagaaagtattttcaccttacgtaaaaaaattattttaatattatttatcttaccttttccaattatggtatggggcgtcatgactcagggatggtggttcccgattatggcatctatgtttttagcctttactattgtgattatgcttattgttgcattaggtaaggatggattaggtgagaaaaaagtggtcgatgcatttgttaatggtgcatcaagcttagtaggcgtatcattaatcattggtcttgcacgtggtattaataggattatgaatgatggactgatttcagatacagtgttaaatttttcatcatcactcgtaaaacatgcgaatggcccactgtttattcttgtattattgattatctttttcttcctaggatttattattccttcatcatcaggattggctgtacttgccatgccaatatttgcaccacttgctgatacagtaggtattcctcgatttgtgattgttacagcgtatcaatttggacaatatgcgatgctatttttagcaccaacaggattgattatggctacattacaaatgttggatatgaaatattcacattggtttaaatttgtatggccaattgtcgcttttgtatttatctttggcggcggcttattagtcgcccaagtattagtatattcataataaaaagccattgagtttcaaattttcgaaattcaatggcttttgttatgcacttatttaggttgaatatagtgtagagatgaggcagtatcggcatcaatttgacgataggatacaatacctaatccttttacatttgattctgaaataatgattgagccatcatcattgactttttcaacaaaagcaacgtgaccatataatgcacttgctccagattgacctgcttcaaatacaactgctgtatgatttttaggggtcgtacttacattataccctgcgtcttcagcgctattatcccagttatgtgcatcgccccattgaccgcctacatgtttatcaaattgttgaacacgttcgtacacataccaagtacattgaccatatggatatggtgaagaaacatctgaaattgaaaatggcttaaatgcacttcctgaaacatctgtgctattacttcctgttgatttcgaatatttatctaaatcaggcatgtgttttttatcaaaatcagttaaattgtaatgttcaattaagctatttaatttcgttgcatagtttggatcagtcgcataagtttggcttaaatgacgtgttgttgaacgataacttggtgcaatatttttccaagatgatttataaattgtaggattaccgtcaataccatgtttgattaaatcagcataatcttttaatgaagctttaagatttggatatttacggaaactagcattaatactaaaaatattattattactactagcttcaagtgtattgaagttaactgaagcacctttataactacctttcataccgaataaattgtagtttggtgcttgtgcaagagcgctattacctgaacttgattctaaaatagcctgtgcaatcataacagaagcataaatatcattatcttgcccaattttatgcgcatctttggcaatagatgtaataaattcacgtgttgctttattttctactactgcaatatctccattagtaacattgttcccatctaattgtggtacatcttggaataaacttatagcgcgtgtattactttgtttaaaatcattttcaaatgattgtggtgcttcttgtttatgttttagttgtttctccgttggcaattgcggattgtctttatttgtgtctagttggtcttgagttgttgatgtatctttttttgaatcttcactttgtgatgcttgagatgtgctgtcttttttagatgatgtatagtctttatgtgtttgtgttgctttatcactatatttatcaagaagtgcatctagtacatcctctgattgttgacgatctttattaggtgttgcttgctcttcttgagaggtttgagatgttgtattttttgttgtttgctgtgatgttgattgattgctattttcagatgtcgaggactcattagtattagaatcatttaaatctgaagctaattgattcaatgaatctaaggctttgcttacgctagaatcatcagttgaatgattgtcattactgttactatatttaactgatgactcagacgattgatctgactgattattttctgttagtacctcagattgatttgatggtgtggtatgactatttgacttatcagatgagtcttgaggtgatggatcaattgttgtgtgttgatgtgatgattcagtacgatcttcatctgaagaagttgtattcgttgcatttttgtcatcattagtattagatgaagatgaatcactttcaatatgttcatatttagaaatatcatcatcaaaatggaataaagatgaaatcaaacttgttaaactaaagccattttcaaagtgactaggatctaaaaagtttgatgagaatgaatgatttgaaccattcatgttaaatacagataatggtgtatgatacgtgtcttcatctttagtatgagatgaacgattatttttcgaatgtgttgatgatggtttagaatgagaagcggcatcttcatttgaaactgtgtctgattgactttcttttgactgagagtcttgctttttattattatcagagctatcagaagttgaatcttctgaagatggagtttcattgctttcagtacgtgttgtttctgatgtagaagttgaatcctcattatttgattcagatgttttagtttgttttgtagtctcttcagcttgagcaacactagacgtaaatgttggtaaaaccagagttgtagttagcaaatatatcatgaatttttgcttcgacatcaataaacgctccttacttttgtataatatattttataaatccgtcttaagtcagacgatttctatcgtattttaacgtagcattagctttgtcgctaaaattattttctgctataatgcatgagtaccattttaattgttgacgtatatcaactaattatggcattcgtgataaaagtattatactaattctacgatataaaaaacaatgttttaaatcatattgatataaattcttaatatttcatttttaggagagtgaaaatgaagaacgcgtttaaattatttttgacagacttaaagcgtgtcgctaaaacacctgctgcttgggtaattctaggcggtttggcaattttaccttcattttacgcatggtttaatttatgggcaatgtgggatccatatagtaatacaggtcatattaaagtggcagttgtaaacgaagaccaaggcgataaaattcgaggtaagaaaattaatgtaggtaatacgctcgaagacacattgaagaacaatgataaatttgattggcaatttgtcagtcgggagaaagcagatcatgaaatacgaatgggtaaatattatgcaggaatttatatacctaagaaatttacacatcaaattacgggaacacttcgtaaacatccggaaaaagcagatattacatataaagtgaaccaaaaaattaatgctgtcgcccctaaaatgactgataccggttcgacaattattgttgatgaagccaataaacaatttaatactactgtaacgaaagcattattgaaagaagcaaataaagtaggtcttcaaattgaagacgaagtaccaactatcgataaaattaaaaatgcagtatatactgcccatcaatctttacctaaattgaataaaattgcagatagaattgtttatcttaatgatcatcaagatcagcttgatcaatatgcgaatcaattccgtgatttagataactataaagatgatattttaaatgctcaacaaaaattaaatgatgtcaatgcagcgattccttctttaaatcaaaaagcaaaactaattctcgcattgaatgaatatatgcctaacattcagaaattagtgaatgtagcagcagatgatattcctcagacattccctaaaattaatagaggggtagatattgcgagtcaaggattagacttagctaatcaacaacttaatgatgcgcaaggttatttaggtatggctaagcaacgtgttggtgattatcaagaggcaactaggcgagcacaagcagttaatggtaatgtgaataataatttacgacaacaaagtgcgacaactaatgacaacggtatgcctcaatatacgattcaaaaactaagtaatagttcgaataatgatcaattacctaatggtcagattctttcgaatgaagatgttaaatcaatgaatagtggacttgctgaagcattacttgcattatcttcaaatgctgataagcaagctaaggcatcacaatctgatgtaaaagcattaagagatataacgtatggtgtcattgcctctaatcgtccaacagaatataatgacatgcttcgaaatattaaaggacgtttagaaaacacttcaaaatacaatcaacaattgattgatgtattaaaagaattaaaacaacgtgaacatgtgaatttagcaccacaaattaaacgaatcgaaagtaccaataaccgtattaatgatacgttacgttctactaaccaattgattgatgcattatcaagtggtggtaaaggtagtgcggagtctattaatgtattaagaagcttgccagctttaaattctggtttaggtagttatagagattacattaaagataatttaaatcatcgtttacttgtagtttctaatgatattacaaaacaattaagtgaaggccaagttgtattatcagatgtgcaatctaaattaaatacgattaatcaagtgattcaagcaggtcaagatattgtaggtaatggtcaaactcgtattgcaacacttcaaagtgaattaccatcacttgaagcgggatatattgaagcaactcaaactgctaaaaattacttcccaacagtacgaaaaaatgtagcaaaagctgcagactttgtacgtaatgatttacctgatttagaacaacgtcttgcgaatgcaacagctactgttaatgctaacttaccaacattatttgataagtatgataatgcagtagatttattagatgagaatcaaccaaaagcaaaagaagctttagcgaatttagcgaactttgcacaaacaaaattacctggtatcgaaagagatttaaataaggctaatgatatattcaatcaattggacgatgacgatgcagtagataagcttgttaatagtctaaaaaatgatttgaaaaaacaagcagatgttatcgcaaacccaattaataagaaaactgtggatgttttcccagtcagagattatggttcagggatgacaccattctatacagcattatccatttgggtaggcgctttattattagtgagtttattaacagtgcataacaaacatgaagaattagcagatcagttaacgaaacggcaagaatatcttggtaaagggatgttctttatcttgatgggtgtattacaaaccctcattgttacaacaggtgacttattcttacttcatgcgcaagtagaatcaccattgctctttgtactcgttgcattatttggtgcaattgtgtttaataccattgtttatacttgtgtatctatattgggtaacccaggtaaagcggtagccatcattcttttagtattacaaattgcaggcggtggcggtaccttcccagtagttacactacctaagttcttccaaaacatttcaccttacttaccatttacgtacttaattgattgtttacgtgaagttgtaggtggtattgtaccagaaattttaattacaaaattaattatatttgggctcttcggtcttggtttcttcttaattggatttattgctaaaccattcttagatccaattatgactaaaattgcaaaacgtgtagaagaaagtaaagtaacagaatagaaaataaaatagcctgattgataatgaaaaagtcattatcagtcaggctattatttttaattagatttgttattagattcactactacgatgagtgtgactttcagtagaagactgcgtactttgttgcgatgaaggtttttcttctgtggaaggttgttcagctgatgattgctctgaagatggtttttcttctgtgctttgagatgtgggttgttttgacgtgttactttctgaacgatgttgtgattgtgacgtagttgatgattcacttgtttttggctgtgtagtctgaacagtagagtgacgttgcgtcgtttgttgttcttgtattgattgacttgttgactcagattgcgcagtggtaccattgtcagactgattagtttcattagattgaactgtatgactttcagtagtagtttcttttttatctttctttttagtagattgtgtttgatttgggtcagattggttagaatgagtggctgcaaaaaagactgagcatcctaatgccacaataagtaatataatgactatagttgctaatatttttttcaaatgatagtcctccatttttaattcatttctttagtttattataatcaaagttcaacaaataggtagtatgtatataacccaatcatattacattttatttacataattctatgatagatacatctaaagtacagtgaattaagataaagagtatgagataataatagtgaaataaaaatccattagagaaagaaggacaatcatgaataaaatagttaaatctatagcatcagttactttagcatttgggacaatgttaggcgtaagtacagctgttttaccaatcgaggatacagctcatgcagctacaaaaccatattatgtatataacgggtatgtagataaagacgcaaaatttgtaacaaataaacattttattaaagcagttaaatatggaaatgtaacaatgaatggaatcaaatttgaaaaagtgcatagtaataaaaaacttgaaaaatataaccaaacatttactggtgtaagtaaagatggcaaaaaagcgaataaagttcaatttagtgttaaaggggatctgacatataatcaattgaaaaaagcgtatggctcagattttaaaaaagtaaagggtactccaagtgataaaaaaagtggtattttcgaatatcaacctaagaaagatggattaattgtttcttttgttatcacacatggaagaacagtagaagtagatattggctatgaaggtgtcacaacaagtaaataaatgataaatacgagcggaattgagttcaattcccgctcttttttattattcaatgtgacataatactgcaaactcgagtttcattgtttgtgagccattctcattactaattgtaatatactggtttaaagtatcaatacgtttaatataagctgcaatagaatgaatcgtaccatttctaaaataactaatcatagcgagttgatgcgttgtatatttttcaattaatcgtctattcagaatattgaattgatcatccgacaaagagggcattgttattttattttgattttctataaaagcatttatgcgttcatactgttcaggcatcactgcaaaaggttatatatatattgaagaatatagactattttgtttaaaatgaatcatattttaagaaaaaatgaacaaagtaaaaatattaaatagtctttttttattacgtgtaataagtttaatatgtatgatgtaaaaagagttcgaatagtgtatacttatactattaaaaattagaaatgagattattatgaaaatagtagaagtaaaatctaagaatggtatcaattttatgattttagatggtaataatgaacctatagtagatgcagtaagatatttgaagtatctggatagtgttaataaaagtttaaataccaagaaaacctatgcctatgcactaaaaaaattttttgtttacttagaaagtaaaaagatatgctataaagaagttagttttgataactttgttgattttataagatggatgaaaacaccttttgaatatgagaatgtcctctcttatcaccgaaaaggaaaaagcattagtcctaagacaattaatctgactattactgtagtatctaatttttatgattatctctataggagcaaaaaattagatgttaatttctatgattttatacatacggaaagtaaatactctaaaaaatataaaagtttcatgcatcacgtaaacaaggactatggaatgttgaaaaatattttgaaagtaaaagaaccaaagaaaaaactagaagtgttaaccaatgttgaggttaagaaattattaggagcagctaataatattagagataaattcttaatacaattattatatgaaacaggattgcgtataggtgaggtattatcattacgcattgatgatatcaaatttgattttagaaaaggtcaccaaatagttttgaaaaatagatttaatagcaatggtacttatttaaaaactggtgaaagaaaaatatttatttctcaatcgttaattgatttatatgacgattatgtgtacgaaataattgacgaactttccatatgttctgattatctttttgtaaaaataaagggtagaaatgtaggagaagctatgcattatagtgatatatattcattatttaaaaggctaaaacataaaacatctataaatgttcacccccatttatttcgccatacacatgcaactgttttttataatgaaactaaggatattaaacaagttcaagaaagactcggtcatagtaatatacaaacgactattaatttatatgttcatcccactgaagaagatatacgtgaagattggaataaagttaagcatcaatttcaagtttttaataaaggggaataactatgtcaataccaattaatttacctacaaacagtactatgattaatgaattatgtacattacaaagtagaactataaacataaaaggagaagtgctaataactgaaatatatgatgattactttttaaaaaatgatgaatggcacatttcagcttttaacaagttcgagcaatttcaagatagtatcaagaactataaagacaaaagaaaaaatattttctttaggattaaaagtgaaaatttgaatttagaatttaaatacctttttttgaaacttatagttaaagaggattggtctttatctaatgtatttaatactggagcagtgaaacttaacaagattgctgagttctttaatgaagtttatccaaatttaaattctttactagattgtgatattaatatgttagaaaagtactggtttagttggttgactaaaaataatatacctataaaaagaaaatcatcaacaatagtttttggtgattatgaacataaaagtggactagcttcttttttaaagaatatgtatattaatctaaataaatttattgataagcgagaagaatgggaaaaagataaatgggatattagaaatttagaaaaatatggattgagttataataaaacactaactggtaattatttgaactttgaaaaaattgagtcaattaaaatgcgagaattagcaaaaaaatatttaaaaaatcgtttgataactggtgatatagcatttgctacagcaagattttatataagagttttgactaggttttttcaaaatatatctaaaaataaagaaacaaggaatagtttaaatgaactagatagatgtcatatcgaagcatatatagaatttttatttgaatatgctaatagtaaaaatgtgcaaagttctaggaacttcgttagagaagaattaaaagcaattagaaggttcttaaatgatattgctagtcaaaattatgatatagccccctctgaagatatacgttttttaatttatcctcaagactttcctaagcgcgaaaagaaaaatagtagccaaattgattatatcccagattttgtattggaacagctttttgagcatataaatgatttgcacaaagatttaatacctgtagtttggatagcttttaaaacaggactaagaatttctgatgtattaacattaaaaaataattgtcttgcaaaagttaatggaaagttttcaataattactgatattgctaaaacttttgttaaaggacataggataccaatcgataatgaattagctgatatagtagcagttttaatagccaattctaaaattaaaagtacaaaagataacaaccctaataattatatttttgctattcataaaggaaaaagaaaaggaatgccctttacacagcatatggtcagagcacacttaaatcatttagcaaaaacaaaaaatattcttgatgaacaaggtgaagtcttccatttcaaaactcatcagtttagacatacctatgcagtgaaattgttaaatggtggagcagatatattaaccatacaagaattattagcacattcctcaccagaaatgacactcagatatgctaagttacttgatgatacaaaaagaaaggcttttgaatcagttattgatcaaggggcttttagttttgatgttgacggtaaaattaaaaatatacagcatagtagtgaattatcagaaaaagcattgaattctttatggcaagaacataaattaaacgcaatggacaatccttatggtacttgtcatgctagattgagcggtgattgtccatatatggaagctccgccatgcttaacttgtaattctgggaaaccatgtaaggatctagctattggattttctgatttagatgttgaaaaatatgaattacatatcaaatcaacggtcaaatctatagaattagctaaaaataataatagacaagatatggttgaaaaacatactaatatattaaataaatatgaagaaatattaggtaatataaaagatggaaacattatattcgggagaagtaatagaataaaagtatagaggttaagatgggaaaatttaatagacaagaacaattaaaacagttacatgcagaacgaaaagttaaaaccgagcaaaaagtttctaaagcaataaatgaattggttcgaaaaaatgaagaaattaactttaatattgttgctaagcattcaaatgtatctaaagctactttatataataatagtaaaattcgaaagagaatcgaagagttacgtgaacaaagtaaagacatatttgtacataaaaataacagtgacggtaaagacgcattaatttcttcattaaaaaggagagtaaaatctttagaaaatgagaaaaagaggctcaaagatgaaataaacacattatataataaaatatatgaagatatttaatacacaggtaaagagaaataattcgagtttaagagatattatacacattagtattaaaaaaagtatgtttagtatttgtagaatcgtaaaatgtaaaataaccattgattgtatcaattttcaaaatttttcctgtatagtttgaaatgctgccgtcttcccaatatgagattgtacataactcatcattttgaatttttatttgaaaaatctgatctaaattatctaatgaatcatgtgttagcaatggtttttctattttattttgatcctttataatttgttctaaaatttcaaactgttgcgggagagtcgcaaaagcttgccatttgatttttccacgcccttgagggattttagggtttaaatattttcttggtatttttctataatcagtttcatatttatattcatctggcgcattaggatttggaatcatgtttaccacctcatcatcattgtagaacgtatgttcttttttggcaaggattatataattttttaatgtgattaattaattaatttaaaataagttattttttatatggaaaagttgagtaagattatcgagcatttataattatagtaactggaattatgatgtttggtatgttaatagtattttctcttttaaaaaatgtgaacataaaaaaatagagtctgggacataaaccctagagaaatagccagtaaatgagttttaacaaattcatttactggcttctttatttacaatactccgtattgttggctcgctttcttaggggacagcttcagcctgtagtcttcagcttgtcctgttccctcaagagtctcgccaaaatactttgtatttatatgtaattttacattgtaatactttaaaaaaataaagcactttcgtataatttaataaacatcactaaactaaattaacgaggtgccttatgtataaaaattataacatgactcaacttactctaccaatggaaacttcagttcttatccccacaaatgatatttcacgacatataaatgatattgttgaaacaattcctgacaatgaattcgacgaattcagacatcaccgtggtgcaacttcgtaccatcctaaaatgatgttaaaagtgattctatatgcctacacacaatctgtattctcaggtcgtaaaatagaaaaaatgcttaatgatagcatccgaatgatgtggctatcacaaaatcaaaaaccttcttataaaacaattaatcgatttagagtaaatccaaaagtagatgctttattagaatctttatttattcaattttacagtcagtgtgtaaaacaaaatcttatagatgataaagctatttttattgatggtacaaaaattgaagcaaatgccaatcgatatacatttgtatggaaaaagagtattcaaaaccatgaattaaagatgaatgaggattctaaagccctctaccatgaattggtaaccaataaaatcataccggaaattaaagaaaatcatgataatgaattaacaaaagaagaaatagatttgattggtagtcacttagataaagaaatcgaagatttaaaccaacatatcaacaatgaaaaatgtactaaaacaagaaaacaaatacgtctcaaaagaactaaaatcaaaaaatacaaaaagcaaatcaatgattattttgagcgaaagtatcgatacgaatttcaaaaatctattttaaaggatagaaatagttattctaagacagatcatgatgcgacatttatgagaatgaaaaaagatcacatgaaaaatggacaacttaagccagggtataatttacaaatagcgacaaattcccaatttgttttatcttataatgtgtatcaaaatccaacggatactagaacgatgattccatttttaaattcaattcaagagacctacggtcatttacctgaatatattgtagctgatgcaggttatggtagtgaatcaaattataaggcaattatagatgactttaatcgaacgccactcataacatatggaatgtttataaaagataaaactaaaaaatataaaagtgacatctttaatactcaaaattgtaactatgaggaaattaatgacgaattcatttgtccgaataataaacggctaggttttaaaagatatgcctatcgtcatgataagtatggttataagcgagacttcaaattatatgaatgtgatgattgttcagaatgtcctctgaaaaatcaatgtatgaacttcaattcaaaaacaaacaaaaaaataatgaagaattataactgggaatattttaaatcccaaattaacaaaaagctttcagaaccagaaacaaaaaatatctacagtcaaagaaaaattgatgtggaacctgtttttggatttatgaaggctattttgggtttcactcggatgtctgtccgaggactcaataaagtcaaaagagaacttggttttgtattaatggcacttaatataagaaaagtagtagctcaacgagctgaaaataatcaaaaaatttataaaaaagacaatttctatattatttcaatagaaattgtctttttttcacttatccaagaactttatgtcccggactcttcgatattatgaagttttatgaaagatagaattatatcagtttttgtagtacatttagactattaaaatttgtttattacattcttggcggtttcacttatcaatttatcattaggtttatcacttttattgtctttattcgtaaaaatgactaaaataataggttcagattggttcttaggataaataaaagctacatcatttctagaagcatatgttattgcttgaccacttttatcagcaaccttatagtcttttggaacaccatctttaattaaagtgtctccgtttttattatttaacattaaatcaagtaagaaatttttattttttttgcttaattttccatttgcgataagtttatttaaagtcttgccgaaagcagcaggcgttgaagtatcttttttgctctttggtgaatagtaatttaattctatttcatatctaactggatttgttactttatctcccaatttttttaaacgttttttaatttttttgattccaccgatttcgtttataattttattgtttgctgtattatcactatacttcattgaagcctcaataagttcttttaaagtgatatcttttcctacatatttttctaaaataggagaataagcaactatatcatctttgttaatatgtacttttttatttaacttattataaggtacttgttctaacaaaatagcactatttatcgcttttgaagttgaagcataggcaaatctcttatcggcattaaattttacttccttaccacttttagtatctaatgcatagacaccaatattagcattatatttcttttctaaattatttaactctttagcatgtgaactggttgaattacatgcacttaaaactaaagcaattgcaattaaaagtattaactttttcaaaatataccctccaatattacagttgtaatttctataaatcaataatattacaattgtaatattcgcgtcaatagtttattataattatttgaaagaaggtgttgaaatggctaagttattaataatgagcatagtaagcttttgttttatatttctattgttattattttttaggtacatattaaaacgctattttaattatatgttaaattataaagtttggtatctaactcttcttgcaggattaattcctttcatccctattaaattctctttttttaaatttaataatttgaataatcaagagcccacagttgaaagtaattcacacaatttgaatcctaacataaataccactaaacctgttcatgagtttacaacagacatccataagattaattgggattcaatagataatatctgcacagttatttggatagttttagttattattttaagttttaaatttttaaattctttattatatcttaagtatttaaagaaacagtcactttatctaaatgaaaaagaaaaagataaaataaacaagatacttttcaatcatcaatataaaagaaatattgtgattcgaaaagcagaatctattcattctccaataactttttggtatggaaaatatattattttgattcccagtttatattttaaaagtataaatgacaaaaaactaaaatatataatattgcacgagtatgctcatgctaaaaacagagatactttgcatttaattatctttcatattttttctattgctatgagttataatccactaatacaaattgtaaaaagaaagatgattcatgacaatgaagtagaagccgatagatttgtccttaataatattaacaaaaatgaatttaagtcttatgcggaagctattatggattccgtattaaaaaccccatttttcaacaaaaatatattaagccattcatttaatggtaaaaaatcattactcaaaagaagattaattaatataaaagaagccaatttgaaaaagcagtcaaaattaattctaatttttgtttgtatttttactttttttatcatgataattcaaagccagtttttaatggggcaatccttaactgattataattataaaaagcccttacaaagcgattaccaaattttagatgaaagtaaaaattttggttcaaatagtggatctttcgttatgtacagcatgaagaaagacaaatactatatttataatgaaaaagaaagtagaaaaagatattctcctgattcaacatacaaaatttatttagcactgtttggacttgaccgtcatattataagtgataaaaattcacgtatgttatggaatcataatcattatcctttcgattcttggaataaggatcaagatttaaatacggcaatacaaaactctgttaattggtacttcgaacgtattagtaatcaaatatcaaagaactatacttatgatcaactcaagcaattaaattatggtaataaaaatttgggaagttataaagcctactggttggaagatagtttgaaaatatctaatcttgaacaagtaatagttttgaaaaatatgatggaacaaaataaccattttagtaaaaatgaaaagaaacaattatcttcttcgttattgattagaaaaaatgaaaattatgcattgtatgggaaaacaggtacaggtatagtaaacgggaagtacaataatgggtggtttgtaggttacgtaattacaaatcatgataagtattatttttctacacatttatcagatgaaaaagcctctggtgaaaatgctaaattaataaatgaaaaaatattaaaagaaatgggtgttttaaatggccaataagcaagttgaaataactatggctgaatgggatgttatgaatataatatggaataaaaaatcagtatcagctaatgaaattgtagttgagattcaaaaaaataaagaagttagcgataagacgattagaacattaattacaagactatataaaaaagagattataaaacgatataaatataataatatttatttttactcatcaattattaaagaagatgatattaaaatgaaaactgctaaaacctttcttaataaattgtatggaggggatatgaaaagtttagtgcttaattttgcgaaaaatgaagaattaaataacaaagaaattgaagaattgcaagacattttaaatgatattagtaaaaaataaatagatatagggttcaaacataatacatatataaattatgtttgaaccctattaaattagattttttatgagattagtacatataataaacgctgcccacttaatcatgccacgtccttgtgggatgttagtgtctaaatattctctaggaatgttgcgataatctgtttcatgtttgtattgatcaggaatcattaaaaccacctcgattatattatagaacatatgttcgagttcttgaagtgatttcttataatataaataaattttatatttaaaaattaaaataatgaatttatatatcataagaccacaagtttaacaaaggggaagtaaactcgtggcctagtattgttatgtaatataacattttgtgaaggagtgaataggactattactcctaattatagtataccacaattttataaaaaaatatttaaatagatgactaattactataaagattgtatagataagagtaatgaagtatgatatgagtagtttaaagagaaagaggaagacgcatatgaaaaagataacaaaagtatgtgtagctacgacaatagcgtttagtacactattaggtgctagcgtcacaggtgcacttgttcaacaaccgactgcccacgcagcaacgtcatcatattacaactatgatggttatgctggtcaaaatgcttcattcgtattagataaacattttaaaaatgcgattaaagctgaaaatgttaaatttaatggcattaaaattaaatcgacaacatctaataaatcggtattgaaatatgatcaatacttcagaaatgtatctaaagatggtaaaactgcctcgttattagatatggaagtcaaaggtcaactttcattaacacaacttaaaaaagtatatagtaaagagctacaaaaaattgataatggtaacaacaacacaacaggtatttattactatcaacctaaacaaaatggtatgacagtttggtttgatgttaataaaggtaaagtagatagagtcgtattaggctatagtacagtacaacaagcaatgaattaaatggatgattgaagtgaacgtattcgcttcaatcattttttatacacataggcgaataaatattaaatgattatataaagctatttcaagttgaaattttaaaatcctcttttaatcaataattaaaagattttattattggaaattaacatttaatgctacgatagaattatatacatgaaatgtatattttgaaccgctactccatgataatgacatatcaatataccatttacttgaaggaggaatacaaatgacaaaggggccaattcaagttaataatgaaatcggtacattaaaaacagtactcttaaaacgtccaggtaaagaattagaaaatttagtgcctgaccatttaagtggactattattcgatgatattccgtatttaaaagtggcgcaagaagagcatgatcaatttgcagaaacacttagaaatgaaggggtagaagtcgtttatctagaacaacttgctgctgaagcgattgaaaatgaagatgtaagacagcaattgattgatgatattttatcagaatctcaaaaaacaattttaggtcatgagaaagaaattaaagattatttttcaaagttatccaatcaagcactgattgaaaaagtaatggcaggtataagaaaagaagaaattcaacttgaaacaacgcatctcgttgaatatttagatgatcgttacccattttatttagatccaatgcctaatctatattttacacgtgatccacaagcaagtattggtagaggcatgtcgatcaatcgtatgtattggcgcgcaagacgtcgtgaatctatttttatgacatatattctaaaatatcatccacgttttaaagatgcagatataccggtatggcttgatcgtacatcaccgtttaacatcgaaggaggagacgagcttgtgctttctaaagatgtattagctatcggtatttcagaacgtacatcagctgaagccattgagcgactagcaagaaatatatttaaagacgactatactacatttaaaaaagtacttgcgattgaaatacccaatagtcgtacatttatgcatctagatactgtatttacaatgattgattatgacaaatttacagtgcatgcagctatttttaaagaagagaatcacatgaatatctttacaattgagcaagatgaaatgaaagatgatattaaaattacacactctagacagctacgagaaacgttagccaatgcattaggtgtagataacgtagaattgatacctactggcaatggagatgtcatagacggtgctagagaacagtggaacgatggatctaatacattatgtattcgcccaggcgttgtggtgacatacgatagaaactatgtctctaatcaattattacgtgacaaaggtattaaagtgattgaaattaaaggcagtgaattagtacgtggtcgcggaggtccaagatgtatgagtcaacctttatttagagaagatatataatgttttcacgtgaaacaagttataatcaaaaacgttagtcatttggctagcgtctttttatattaaaaaacattccattagtctacaaaaagtgtaaaatagatatcatacttataaattggaaggacgaaacaatatggcatttatgactattaattataaatcacctacgattgggatgaatcaatcgtttacagccatcgttccagaagacgatagcttttttaaacaacatgaacctgtaaaaccattaaaaatgttattactattacatggtttatcaagtgatgcgacatcgtatatgcgtttcacaagtatcgaacgttatgcagaagcacatcagttggcagtgattatgccgaatgcagatcacagtggttatgcaaatatggcttttggtcataactactatgactatatattagaaatttacaattatgcacatcaagtgttaccagtatctaaaaaaagagaagataattttattgcaggtcattcaatgggggggtacggaaccataaaatttgctttaactcaaagccatttattttctaaagcagcgccattgtcagcggtatttgatgtacaatcattactcgatattgagtggaatgactttgatcccaaagccattgccggtgaagctttaaaagttaaaggtacagagttagatacctatcacttagtggatgaagcggttgataaaggcgcaacacttccagaactctttattcaatgtggcacagaagacttcttatatgatgataatcaacgatttatgaaatatttagatgaaaaaggtatcaattataaatatgaagaaggacctggggaacatgattatgctttttgggacaaagcaattgaacgtaccattgaatggttagtagagaaataaaaaaatatccttttgtgatgatacgtcacaaagggatatttcgttttatttaatgatttcaatcgtaaatggaacaacaaaatcttcgcctttattcattgcaagaatagctaaaatagtatagacaaaaccagcaatacctacaacgaataaagttaagtaaccaatgaatactacagttaaaactaaactttcaaattagcgaatgtcatcggtcaagtcatcaagcatgttgatatatctgataagaatagataaccaaaaataagaaatagatactttttctatttcttatttttttaattcataaactaatttgagttattattttgagtattttaaaataatgacaagtattaattattttaggtttttcgtgaatataaaagaagctactctaaatcaataaggagcgtaagtttagtgtacagatattacataacctcggtcgttatttttctagtattttcactgatatgtggcatggcgcttgttgagaacaataatacaaaagtttccgttgtggcagtaggagataatttaattcatcctgttgtctatcatgatgcacaacattctgatggtacatttaattttaagccaatgtattctaacataaagaaagacatagctaggcctgatttagcttttgtaaaccaagagtctccgcttggtggggatgatattccattttcaggatttaaacgattcaacacacctagtcaagtagcaggtgacattgttgcaacagggttcgatgtgattaatggtgcaaataatcactccttagatcaaggagatcaagggattacaaatcatatacagacttgggaaaaatttgatcataacgtattgtttacaggaatatacaattcgaaaaaagaggcgaatcgtgtacataccatttctaaaaatggtgtgaaaatcagtgtattaagttatacatacggaacaaatgatatggtctcaaactatccatatacagtaaaaacgtttgacgaagcaactattaaacaggatatacgaaaagccaaaaaacaaagcgacgtcgtcatggtgtcggcacattggggaaatgaaaatcatcatacaccaaataaaacacagaaaaaatacgctcaattatttgcaaatgaaggtgtagacgtcgtcattggtacgcatccacatgtgattcaaccagtaaagtgggttaaagcaaaaaatcatcatcataaaacgttggtagcctattctttaggtaattttttaaatggacagtatagtggagatgaaaataatcaattgttaggaaggataaacttcgatgtagtaaaagaacctaaaggtgtacatttaaaaaatgttaaatggacaagcatggtcaatcattatgaacaatcacgtcctaccaacaaacaaacacgccaaaattttagaatttacaatctagatgattacacgccacaattagcgcataaacatggtttacaatctgattcagacagtgaatggaatatcaaacatttacaggatattacaaaagatgttatcgataataaatttttaaatgaaaaaagtttataaaaaagagcgactgtacatgtgtaaatgatacatacagtcgcttttgatttatctatataaaagcttttctgttatacagtttatttattttgatttgcaaaagctttggaaatatctcgcaatgtttgtggtgcatcatcccacttcatcgtcacttcagtgaagtgcatgtgttcttgatcttcgtttatttcatcgaagacagcctttaaatcttttgaagttttaacatcatggactttcacgttatctccaccaaatacgttgggtaatgctttgtaatcccacatgttgatatcattatagggctcttccataccatgaatgagacgttcaacagtataaccatcattattaattaagaacatcacaggtttaatatcttggcgaatcattgttgataattcttgaacagtcaattggaatgacccatcaccaattaataaaatattacgacggtgtggattagctaattgggaacctaatgtagctggtaatgtgtaaccaattgaaccccataaaggttgaccgataaatgacatgtttttaggtaaagctaaactgtaagccccaaagaaggatgacccttgttcagcgattaagacatcattaccaccaataaagtcttgcatcattttaaagtaagtgtcttgagttaacgtatcatcagttaattcatagtcatttgattctggttgttggtaaaaaggaaatgaagatttatttgtataatctatcgtatttaacgcttctaagaattcaggcaatgcagtttctgtatcaatcgtatcgtttaatttgaataggcgatggttaatcatgaccacttcgttaatatcaaattgatatgaaaagcctgcagtggctgaatcagttaatttggcaccaatatttaaaatagcatcgctatgattgacatagtctttaatgtcatctttagcaatttccccatcataaatacccatatagtgtgggttttcttcattaaatgcccctttacctaacgataattgaacaactggaatattcgttttattgacaaattgttctaattcatcatgtagatgaaaactattgatttcatgacctgcaataattaatggttgttgagctgaacgtaatttatcagccaccatatctatatattgagatacatcttgttgaggtgcgttttcaactttgaatggttgttcaacttcaatgtctgacatagccacatcaataggtaagtgaatgtgtactggacgacgttcttgaagcgctgcattgattactctagggatttcagttgttgcattttcaggcgtgatataggcttgtgctgttgtaatcggttcaaacatatgtcgataactatcaaagcgtccttcacctaaagagtgatgcacatatttgcctgccttttcaacagctcttgttggtgcgcctgtgatagcaatgaccgggacacgctcagcatatgagcctgcaataccattgactgcacttaattctccaacgccgaacgttgttacgagtacgcctagtccgttcatacgtgcgtaaccatcagctgtataagcaccatttagttcattcgttgttccaacccattcaacgccttcatgactgacgatgtcatctaaaaatgctaggttaaaatctcctggcacaccaaatattttattgactcctgcttcatgtactgcatccattaaatattgtcctacacgttgtttcatattcaattccacctttgtattgcttttgtttacatatataggataagcctggtaataaataaagtcaatattattgaccttttgatgaaaatcgttagaaaatttactataataattaataatgtctttgaaaaggaacgagtgaatatggatcgaaataaaaatgattatgagcacatgctattttatttcgcttataaaacgtttgtgacgactgcagatgaaattatcgaaaaatatggtatgagtcgacaacatcatcgctttttattttttattaataaattgcctggtattacgattaagcagttactaaacacgttagaaatatcaaagcaagggtctcacgcgacattgaagaagttaaaagaagaaggcttaatcattgaacaacaatctgaagaagatcgcagagtaaaacaattatttccaacacctaaaggaagtaaactagtagagaaattaaataaagcacaagataaattaatgcaacaaacgttccaaaaagttggaaaagattggtatgcgattatggaagaattatcaaattatcgagaaggatttcaagatattaaacatttaaaagatgaaaaagaatcttaaaaaagaagctgaacggatgtacatcgacagttcagcttcttttattgtagtaaatattaatttaattttaaaattaaataaaacaacaaaatatattattgattattttggaaatattagtattattaaactatatatttaataatactaaggggaaaacaatgaaaaataaaaaaactacatatttatcttatttaactaaaacgttcttgggattagcaatgacggctgcagggataggtgcctttggatttgcacaaaataatgcttatgcagctgaaacacatcaagtattgaattctagtacacagaaaaagaacatcacgaaaacaacgcactcacaagtttcaacgactaaaacttcattgtctaacacaaaaccaactattacatcaacacaagtacctaacacaaaacatactacaagtactaaatcagcagcagtgaaatcagctacatcaacaaagccgacagcaaagagagtaacgtcaaagtctactgcaccaattaaaaccacaaagccgacaacaaagagagtaacatcaaagtctactgcaccaactaaaaccacaaagccgacaacaaagaaagtaacatcaaagtctactgtaccaactaaaacaacaaaatcaacagcaaagaaagtaacgtcaaagtctactacaccaactaaagcaacaaagccaacgacaaagagagtaacgtcaaagtctactacaccaactaaaacaccaaaaccaccaacaacgactaaaaccacaaagtcaacgacaaaaaaaataacaccaaaatcaactctaacaactaaaacaccagtaacttctaagaatacgaccttaaataagactcaatcaactattgttaaaaaaatagatgcacctaaaacattagtaactaaaacaccatcttcaacaacaacaaaactacaaataacacaaacatcaaaagcacctgtaatggtaacaccaccagtctataaattaggatctgtgaagccaacagactattatcgttcgatgacagatttactgaaggatacgcaagaaggaaaagattggacaaaagaaagcacgaatagacacagtaatgtccttatttttgcgcctcatggaggtaatattgagaagggaacgacagaattaacaaaggccattgcgaataaaggaaagtatgattattatgcatttaatggaactagaaataaaaataattcacaattacatgtaacatctactaattataatgatctggatttaattaatcgtaactataataaagatgtatctatttctgttcatggtgcaggacaatctcaagggaaaaatacagtgcttattgggggtagagatgaaaaattaattcaacttatctcaaaagagctaagtacgtttaaatttaatgtacaacgtagtttgggacacttagctggaatagacacaaataatgtagtgaattataataaaaaaggacaaggcgtgcaactagaattaacaccagatcttcgaaaatcatttttcagtaatggtgatgattcgtcaaaagcacgtaaaaatgaaaaaaattggtcatcaacaatggatcgttttgcgacagccataaataatacaattcgaaagtacatgatttaatatagaagaggttagagtaaagtagaacgttaagatatcatgtgttaacattctattttcctaaccttaatttatttatagaaagaaagtagtgtagaatgtaacatcacgttatcacgttatattgtaaggccatatttttatatcgtcattgatttaattgaataggcagtatttacatagttacttaataagtgtttcctttgcaataaattgtataatctatatatttataactttatagcattatacttctaatatatgaccttaatcattacttagtattgtttttaaagtttctaaatggaataggaatatttgtagaacgtgttttgagatttcatacgatttatttacacactcgttaaccattacgtatcacgtttttgataccctcgatttaaaaagtgttatttctattatgcttgtggtactaatacaaaccattgttatattatttgtgaaaggagtacgattaataaaatgattcacatactactcctcttagtcattgtcattatattgcaagtgctgatgagacattttcttaataaaatagagttagagtcaaagtataaaaatatgattacttatttaccatttggtttaggattgttttttgttcaaaatgtatattatgaacgtcagtatccacattgggaggtaccacttaaagaaaagttgaatttaaaatatatttatctttttactttcttagaatttgttgcgatatatatttgtttatttgtgatgaaaaattagatattattgtcaatacattctctaaaatgacataaatataacgcaatttgttcgattgactttaaaaataataccaaatgagtgtataatatatttagtctagacttgttttttgacaaaacaaatctaatgtacgctaaaaattaaaaggagtgacaataatgaaaaaacttttagttacaactattattggttttgtaggctatattgctttcaaaaaatatcaaagcaaagtaaacgaaatgccaaatattgaatattaatcatataaaccgagatatttctaagattgaaatatctcggttttttgtcttaatgtattgatataagcaacaactaattataattaaatcatttacagctaaaaatattactaagtaaaacaaaaaattaaagataatttagaaatgaactaatgatgtaaaaaagcactttagcagttttttacttgctaaagtgcttttttgatcataaaacaagacacgcttcaattatagagagcgtcttatctatgagctcaatactattgttgattttgattagacgtgacatcttgaccaaagaagtcgaagatatttttcgcactatctgtgttatcaatgttaccacggaatttatcagcacctgggccatatgcgtaagtatttacgtcttcaccagtatgaccatatgttgtccaaccagtatgagattcgtcattaattggtttttggatggcgtcttgtaatgttgttgttgcttctgcaatttttggatcatcttcatttttagctttatctttaacgtcttttagttctttcgctgcatctttaactttatctaattgttttttagggaagtcgacaccataaccttcattgatcactgtttcagggtctttacctttagcaatttgttcagtcatgtaactgccagaatgtttcattttatgaatagcatctggattccatacataatctttgcctttagcgatggataaaccaccagttgagtggtcagcagttgcgacaactaatgtatctttatgatttttcgcatagtcgatagcgttttggaatgctttatcgaagccgctcatttctgacataacaccagtgatatcattaggatgaccagatttatcaattgaagcgccttctaccattaagaagaatcctttatcatttttttctaatttagataatgcactctcttccatatctgctaataatggattttgttgtggtgcatcaatttgtaacggcatatttttctcagcgaataaacctaatacttggtcactttttgagttagctaagtcagttttattggttacatagtcgtaaccatctttttgaaatttctcagttaaatgaccattttctttaccgaagtacttagagcctccacctaagataacatctactttatgttggtcattaattttatcgttataaaattgttgtgcaatttcatcttttttatcacgatcatctacatgtgccgcatacacagctggagttgcatcagtgacttctgctgttgtcactaaacccgttgatttaccttgttctttagcatattctaatactgactttaaaggttttttatcattatctacagagattgaaccattatatgttttatgacctgtagcgaaagctgtgccacctgcagctgagtcagtgacattttctttaggatcgttaggattagtacggttagttccttttaaatatttatcaaaagcagtttgatctaattctttggtattaggattatctgcataataacggtaagctgaattataagaaggacccataccatctccaaccatgaaaatcacatttttaggatttttagtgttaccgatggccatgtaatcgccattttgaccttgttgatcttgagcaccttgtccagcaccagatgcgaatgacacatgtgttgtacctaatactgaagcagctagaattgaagttgctactgtggtttttccaaatttattgatgaaactcattattaaaaaagccccctaatatgtaaaatatagattacttacatctttatattaagaaactttatttgatttgaagtaagtatttagtaaactttagtttaaggtattgtaaaaaaatattaatttatcatattctatgatttgataaattaatttaatataaagaattgaaaatatatgttataatagtattaaataaaatagtttgatcttattaagagtaagtggagggaattggccctatgaaacttcagcaactgcgctttgcgtgaggtgctacatccaacaggattttcctgaaagataagaagatgtcgacaagcgcttcttatttaaggagggctattttatttacccaaattaaaaaaggtggtaaacatatgacaacattacaagaactatttaaagaattagatgattgggaacagcatagtcctaaaagttgggcaggaagtatgggaagaacagcaaaaatcaatgatatccaaagacaaattaaagaagcgatcaccatagaagatattagaaagtatattttaaataaagaagattaaaagtaaaagaagtatgggagtgagacagcgtattcaaagtgaattcgaatctcgctccttactttttatgaaacagtcaatctcgaacatattcaatttaaagaaaaagcgttaaaataaagttaaagaaattatgtcattaataaatatatagaggtgaatcaataatgatattcgtaatgttatctcctttactgataattgtatttatcgcattatctattatggaagaaagaaaacgtaagaaaaacactcaacataaagaaaatgaatttgagaaagaaaaaaataaaatgtctaatcctaatgacaataatgatcatgacgcaaaataaaggatgaaaaaaatgaaagtattgattgtcgaagatgatgtcgtcattgcagaaagtctaggaaatgaactctcacattggaactatgaagtgagtattgctaagcagtttggtaatattcttgaagaatttaaaactgcagaacctgaacttgtgctgttagatattaatttacctacatttaatggttatcattggtgccaagagatacgtaaagtatctaatgtcccaattattttcattagttcgcgtactgacaatatggatcaaattatggcaattcaaatggggggagatgactttattgaaaagccatttaatttgtcacttactatagcgaaaattcaagcattgctacgtagaacatatgatttaacggtttcaaataatgagatgactgttaaagggtgtaaactcgttgttgatgaagccacactatactacaacaatgactctgtacaactttcgtttactgaactacaaattttgaataaattatttcaaaatgaagggaaatatgtcaatcgtacagcaattattgaaaaatgttgggaatcagagaattttattgatgataatacgttagcagtaaatatgacacgcctacgtaaaaagctgcaatctatcggtattgttgatttcattgagacaaagaaaaatgtaggatataaggtgtaaatagtatgttaaaagcgtttataaaatcgatacgtcatcaaatgatgatagtagctttatttttattacttttcttggtgattttttttctttttaatttgcctttcaatgccttctttctaggtatggcaattattcttttcataatgattattttttggttgattcaacttagtggatttcaagaagcagtgtctttaaaagaagaagttgctgacttagaagatgaattacaacgtgtaaaaaatgaacaagctgcataccaagtcaacgttgagaactattttttaacatgggtgcatcaaatgaagacacctattaccgcttcaaaactccttctagaaagaaatgaagataatgtagtaaatcgtgtgcgtcaagaaattatacaaattgataactatacgagtcttgcactcagctatttaaaattgatgaatcaagaaacggatatgtccttttcaaaagtgaccattaacgatctcgttaaacctcttattatgaaatattcgattcaattcatcgatcaaaaaacaactattcattacacacgttgtgaagatgaagtactgactgatgttcaatggtgtacgatcatgatagaacaaattcttaacaatgctttgaaatatgcaagaggtaaagatatttggattacgtttaacaacgaaaatcatgtgctatctatacgagataacggtgtaggcattagtaaagccgatcttcccaaaattttcgataaagggtactcaggctataacggaagacttcatcaacattcaagtggcatcggattatttattgttaagcatatatcggcacatttacatcataaagtagaagtatcttcaacgctccatgaaggaactacatttgacatacatttcccagaaaataattaaactttcaataatgtaaggataactagtaacatttttaagaaatgattaatgttactggtttctttttgttttatgatagaagtaagtgataaattaaagagttcaatgaaaagaaaggaagcatggatatcatgttgttagacgtgaataatgtaaaaaaaatatttggaagaggcctgaatgctactaccgcattaaatggcatttcatttaatgtggataggggtgaatttgtagcgattatgggtgaatctggatctgggaagtccactttacttaatttaattgcaacttatgatagagctactgaaggtacgataacgattgacgcgcaaaatatacgtcaattgcgtaataaagaaatcgcttatttccgtcgagaccatttaggttttgtttttcaggattttaacattttaccgacgatgacaaataaagataatattttaatgccacttgtacttgcgaatcgctcacatcaaacgatgcgtcatcgtctttatcgcttaagttatcagttacatattgaaccacttcttaataaatatccttttgaaatatcaggaggcgaacaacaacgcgtggctatatgtcgagcactgattaatgaaccagatttgttactcgcagatgagcctacaggtgcacttgattccaaaacttctaaaacgattatggaactatttagagacattaataaaaatgagcaaaccattttaatggtgacacattcggctgtggatgcttcctatgccaaacgtattttattcattaaagatggccgtttatatcatgaaatttatcgtggggaggaactacaatcagagtttcaaaaacgtattgctgatagtttagcaatgcttcacgaaagtggtgattaaaatgacttttcgcttggtttggacgttagtcattcagaattttaagacacagcgtcatattataattccatttattctagtcatcagtacattatttggtattgaatttattttattatccttaaacatgaatacttcgcttcataagcatagtgatgttattccagtttttattagtataggaaatttttttatgtgtctatttggactcctttttattctttatgctaatcgttttattatgcgacgtcgtcaaaaagagctggccatgaatatgattttgggtatggaaaaaaagcattttaggttaatgctgtttatagaaggaatatatcaatatattatcattggatgtctgagtattataggtggttacttatttggtgcattaacttatatgtcgttaaatagaatattaggttatacgcatgtatctttaaaaaaatatccatttgatataagtgcaatgagatacaccttgttgatgttagcaataatgatgctatttttatttattgtcaacaatataaaaatcacttttcaaagtcctattaagttaatacaacaacaacatccaacggaaaaacaatggtccaaacctttactctatatcttattgattgttgggatcataactgttgttgacagttatatgattgccttaaaagatacactcattttggtttcactacgtaatatttttattgcccttattttagtgacaataggaacgtattgcttatttatatcattgagtgttttagtgatagattggcttcaaaagattccgagtgtttattatcgacctaaatatttttttactatttctggattacgttcaagaatgaattctaattctatcggtttggctagtttaaccatgctatgtacttttcttattgtgactctaggaatgagcgtcgctacatatcgtagtgtagaccaacgtgcgaatcatttaatgccaacacaatatcgtattgaattgagtggagatgtgcatcatagtactacgagcaaacataaagtacgtcagctagaaaatgagattaagagacatgctgatgttgatgctttcagggaatatacaagtggaagtgttgcagtcacttataagaagggttcatttgtaaagcgagataatgaaaacagtccattggatttaaatagtatatatttaattgtaatgaatcagaaagattacaatacaatcaatcatacgcacctgcgacttaaacataatgaaatgggaatattagcgaatcatttcatgtttcaaaaattagaccatatcaaattaatgaatcaaacatttaaaacaaatcagttaaaaggagattatttttcatttccagttccaggtggagtcacacttgttactcataatgtaaatcaacaacgtcaattgattcattattatcaaacaacagcaaatattaactcatacattgcttttaatcttaaaacaaaagatacacagtccatagatcatattaagtctaaattgatgaaacaatatgatattcaaattgataataaagatgaattaaataaggatatgtttgatatttatggtggtctcatttttgttggaactattgtttctttagtcttaatgattggtacatttacgatgatgtattacaaaaatattgctgagggatatgaagatcggaaaaactatcgaattatgcgtcaagtaggtttagaagaagaacggattagatctgttattcatgaccaagtagttattatttttactttacctattatagtatctatgatacatgtactatgtgcttctaaaatgatttatactttgcttggtattttagatgttaatgatataaaattattcttaacaacttatatcggtgtcttagtgtttgtaatgataatttatgctttgatgtatgtaatgacgtctcgtgtatattatcgtctcattcatcgttgatatattagtaaaaagaaattctcattcttatatataaatgagtgtaagactttaggcagtagggtataaggataaaaaaggaggcggaataatggcgaaacaatatgatgatgcaacaaatagaaatagtaacaataatattaaacgtactggggaacacgtccttacttggataggtgttgcgattcaagcattagttgcaattatgtttttaatgattaaaccctttattggtaatgctgattttaaagaacaaattattaatgaaacacaaaaacaaggcaatgaggtttctataacagaaataaataatggtatggatgcattaggtggtttatttaatttctttacatggggcgcgttcatcccattaattcttgcaattattggcggtattttaattaataaaaagcctaaacttgcaggtatcttattaattattgcaggtgttttagcaattgctacaaactggatcagtttaattttatggttaattgctggtattatgttacttgttcgtaaacctaagcatgatatgtatggcaatggtggttataatgatcattacaaaagagaccatcatgatgtaaatgcaaataataatgcattcattttgaatgaagaagaagaaagacaacaacaacgttatattaaagatcattattcaaataaagatcaagtagcggacaataataatgaaagagagcacgatacacacgtaaatgattcaaatgatgacgactatcgtgatcaacgttattcaaatcataaaacgaatcaacaaagtaatgattttattcaagatgaagcaagaaagcttcaagaagaaaaagataacgatccatacaaatattaataatatgatatataaaagcgatggtattcctaagttaataccatcgctttttacgttaatttctactatatggtttggataaaatatattagacattaaattaaatctaagtgttctcttagtgtagaacctttatactgatgtcgatataacccacgacgttgtaattcaggtacaatgagtgtaactacgtcgtttaaactatctggtaaagaaggtggcattaagttaaatccatctgcaacacctgcattaaaccagcgttccatttcatctacaatttcttttggcgtacctatgagtgtcagatgtccaccacccgcattaaggtaacttagcagttctctgacagtaggttgcttatcttgaataatttctaagatggtttcatatcgacccacgggaccgttaaactcttctaaggaaggtagtttaggcacgggagcatctaattcccactgactacagtcttgttgaatgaaaaaactgagttgctttaaagcggctttgataggaagtcgttgatcaagttctgctttctttttcaatgcttcttcatgtgtatgacctacataagtgactagtccaggaaagactttaatataacgttgatggcgacgttgtgccatttcactatctaagcgctcgcgataccgttttgcttgcttcatgttccaagaaacagaatatactgcatctgcatattttgtagctaatgcaataccttgtttagatgcacctgcttgcatggccacaggttttccctgaatgctacttggtgttgtcaatggtccatgaacttgaaaatatttgccattgtggtgaagcgggttgatattgcgattgatcattgtatgatgatgccggttgggtttgaaatcttcagtatgccaagaatcaaacaatccgttcatgacttgagcaaactcttcagccttcttatagcgttcatcatgattaggtagatggtccatgctgtgattttgagcttcggcatctgtcatggaagtgactaaattccatcccactcgtccaccactaatatgatctaaactaagtaactgacgtgctgcagtgaatggattagaaaatgtacttgaaatcgtaggaactaatccaacatgttgtgtgacttgggatatagcagttaagttaatcagtggatcaaaccaaaaacttggcatcgaagtatagctagggataaaagactgattatctgcgaaaaagactacgtctaacaaccctttttcagataactgagctaattcttgatagtattgaatatcaccgagacgttcaatacttgaattgggaagttgccaagcagcttgatgatgaccacatccatagatcaatacaccgagatgaagttgatgttgatgagtcaatttaatttctcactccaatgttcattttatttctattctaagataaggaagaccagtcctatattaattcatggttaaaccaccatcgacagtaatattttgaccagtcataccatttgctgcttcgctacttaaataagcaactatattagcaacatcttgtggggtagtcactttacgtaatggagtcgtctgtgcaattaaatcaaaaacgtctggtgtagtgacagcactagcatcagttgttttaagcaatcctcctgacactacattagcagtaataccatattgccctaattcggctgcaatattacgcgtgaatccaatcaacccagctttagctgttgtgtattcatgataaggtacaacgggatgttgatataaatttgtgccaatgcttacaatggcaccagaaccacgctctataaattgtggaatgacactttgagtaacattaaaagcgccttttagggtaccgtcaatttgttgttggtagtcttcccatgctaagtctttaaaggccttttgcgcattaggatcgaatttaaaattaactaatgcgttattgaccacaacgtcaatttttccaaaatgatgtgttgcctcattaactaaacgatcaacttcagcacgttgtgtgacatctgcttgaattgcgatagctttgtcaccaagctcctttgcaagtgcctcagccgcttcacgactttgattgtaattaatgatcacttcaaatccttgtgtagctaatgttttcacaatgaccgcacctaaaccacggctacttccagttactaatactgttctcgtcataaatatcgtgcctccatttacttcatttacagcaaaaaaatatgcaaccttcgcgttaggaaagttgcattaaaatagatctatcattattgagaacagtttgacacatctcaacaggtcatcttattttatacgacactttcctacgctagtataagctagttcaggttcaaagggtttgaggttacacctcatctcagttttaaaacacccctagtgcatatgatttaactatagtttcactttatgacttctattatcagaagtcaagcgcttccattaaagaatatattgattacttttttatttgaatataaaaataaaaatttatataatttatttttataataattttcaattatatgattgaaaatcagatataccgtggttaaaatagaagttacactaaataggtgctttataggataagtaataaacagtttaacgttgaatgaagatttaacgtttttattttttacaaataaaatattgaggagagcgacacgtattatgaattggctagcaattattttatttttagccgttgttatgggggtcagtctttatgcgttttggcgttcaagaaaaataaagactgatagtgcagatggctattttatgggaggcaatagtttaacaggatttacgattgcctcaacgattattatgactaatctatctacagaacaaattgtaggacagaatggtcaaagttatggtaagggtatggaagtgatggcttgggaagtcacagctgctgtagcagttgtcttacttgcatggatattcttaccaaaatatttaaggtacggtgtggataccatttctgaattacttgaaatgcgttatggtacctttactaaacgtttcgtttctatattatttattttcacttatgttgtatcatttttaccagttgtcttatactctggttcattagtatttaataaaatgtttaatattggaaaatacttaggagtaagtgatgcaacagcaacgattattattgcatttgtcattggtgcagtaggtgttatctatttatttatcggtggtttgtcactgagcgcatttagtgattcaatctatggtgtcggattaattataggtggtttgattattacaattttaggtttacatcatttaggtgatgggaattttgtaaaaggattcgaccacatgatccaacgtacgcctgaaaaactaaacgcttttggagccattgattcagatgttgttccatggccaacattattctttggtatgttctttaataatttattcttttggtgtgcgaaccaaatgattgtacaaaaagccttagctggtaagaatttaaaagaagcacaaaaaggtgcgatatatttaagtttattcaaggtatttggtcctatttttacagtgattcctggtgttattgcatataattatttcaatgggggtataacatctaatgataatgcttatcctgcattgattcaggcgattttacctgattggggctatggtctattcggagcagttatttttggagccatattaagttcatttgttggatcattaaacagtacaacaacactctttactttagacttttataaacctatttttggtaagcgtgcttcagatcaacatattgcacgtgtcggtcatatcgcgacagttgtgattggcattattgtagtaggtatatctccacttattgcccttttcccaagtggattatatgcgattgtgcaacagttcaatggtgtatatagtatgccagtacttgcattggtcttagttgcattttattctaagcacacatctaaactaggcgctaaagtagctttagttacacacattgtgttatatgctgcaattagttttatggtgccacaattaaattatctatatacttttagttttatgttctttattgatttagctattatacttgtctttaataaatttaaaccttccaatacgtttgacttaaatactaatcaagctaaagtggatcttacaccttggaaatatcgttatgttacaggcggtattattctaggtttagtagtacttgcttacattatcttttcaccacttgtacttgctaaataattatttataaataggtgtacgtttgaaaagagtagactttttcaacgtacaccttactttttatatttataaagaaaggaggataacacaatgcacaaaattggtttgataccttcaccgggtgtgtctcgtaaacacgtagaagctgttattccagatataaaagaacagctgaatcaacgtgtgaatgatcaacaagaatgggtatttcaactacacgttgatttaatgattggctcagctgaagatgtacatgaaagtattgataaagcggcaaaaatgaaagatcaacatgattgggattttgttgtatgtattacagatttaccaagtatttctggaaataaagtagtgattagtgattttaataatgataaacaagtagcgatgctatctttaccttcattaggttggatagacctacgacgaaaattaagagatagtttaacttctattattgaacaattgtattattcaacttcaagagtggctcccaagattcatcctcttatacatcctaaagcagtagaaccaaatgaagatgaaacgccaaagcaacgttatattcatcgatggtttattctcagttggatccaacttattttagggttaacacgggcaaatgaaccatggaaaaatatttttaatttcaaaaagattatttcagttgcttttgcaactgggacttatgtatcgattttctccatgccttgggaactgagtatacagtactccatagtaagatttattatacttatgcttattgctatcctaggtatgacaggctggttactctatgcacatcaattgattgaacgtaaaacagctaaatcacagcgtgtgtatcgctatatttataatttcactaccatatttacattatttattattacacttttaaattatattattttatatcttttattagcgataagtgtatcattgtttgttccaccaggtttatttaatcaatggactagcgcacatcctcattttacgtttataaattatgtaaaattagtatggtttgtatcttcactaggtttacttgctggggcaatggggtctactgtagagaatgaagaaaaaatccgtcagattacttattcgtatcgacaatatcatcgttataaagaagcagaacaagagaagaaagaaaaagaacaagctcaatcatcttctcatgatgcatcaaatcaacatgttgaagaaagtgcatccaataaacaaaataatgataaccaacaagatgaacataaaaaacaagatcatagagaggaggagacaacatgagtgaagaaaaaataattggtctcgttgtggcaccaggagtgacggagaaattagcacaaagtttaattaatgagatacccaatatattatcagaacaagataatcaccaacgtgactggaaagttgatctcgtggtggatcctcttactggttttgcggaaagtgtggaagaaatattcaaaaaaattcaagattatcataataaaagagaatgggattatgttgtaggaattacagacttacctatgttctatcatcaaaacgtacttgctttagatattaataaaaaaaatggcgctgcaatattttcgtatcctgcttttggatggcgtcctgtaaagaatcgttttaaacatgctatcgtaaccattattaatgaacttcattattctgaaagagagcatgtgggttatgatgacaataatagggttaagaaagaaatcaataaacaatttcctttttcacgtattgagaaaacagaagtacatttaaaagaaacaggaaataatcatttaagatatttatcaaattcacgtagtcttggaatgatacgacttgtcagtgggatgacctttgcgaataacccactgaatatgatggcaagtttaagtaatattgtagcgattgcttttacgacaggcgcattcggattgattttttcaaccatgtggaatatggggcttgatttttctgtatggcgattatttggaatttccgtcatggcaattttaggtatgctcgtttggataatggtctcccatggtctatgggaatctacaaaaaaagctaagcataaaagaattgtaatgttatataatttaacaacgatcatgactttattgatagccattgtgatatattatatgattttatatttattattcttaattgcagagcttgttttattacctccaggattcttaggacaacaagtaggtttaaaaggaccagccagtgtccaactttatttaagtattccttggtttgcaacctcaatatctactgttgcaggagcaataggcgcaggattgcttaatgatcaattaattaaagaaagcacatatggttaccgtcaaaaagtacgttatgaaaagaataactagttagtaataatgaagtgagaaacacttcattattatttttatataatataatgaatttatataaaatttctttaaaatcatttgaaatcatgaataaatataagtgtgaatggatatatggtttttcaagtatgactgaaaaggaagttaaaaagatagttggaaaatataaaattcatataagagtgtatagattatgaattgattacaaggatttagtagttaattataatcctagttttaaagaaaaggtagtaattacagttggagttacttcaataatgaaaaaaatggttatgaagtaggtacttatttaagtaggaataaaataaaacttatatttgtagttcgagaatattaattaaaaaaaggtgcgattccataataggaattcgcacctttttattaaaaattatttttcttcttttcttctattaaatccaactagtactgcaccagcagctaaagctaaaccgcctaataaaccagaattaacatttgattcactaccagtttcaggtaattctttattatcaacaacatcttgagaagtagtgaaattgttattgtgagtagttgtttgagttaggtcttcagtattagttacagggtgattaactactaattcttgacctggaacgatgtaatttgaatctacaaggccattatctttaacaatttgttctacagtagtgttatgtgcattagcaattttagctacagtatctccagtaacaacagtatgagtagttgtttcatctgtagtattgtctacatagtcagcaccatttttaccttcatcatcttgttcatctttttgaccgaagaagccatcaggagtagctggtttagtagtatctacatagtcagcaccatttttaccttcatcatcttgttcatctttttgaccgaagaagtcaccaggagtagctggtttagtagtatctacatagtcagcaccttcttcaactacatcagctttagggaagaaatcttcagaagtagctggtttagaagtatctacatagtcagcaccttcttcaactacgtcagctttagggaagaaatcttcagaagtagcttctttagaagtatctacatagtcagcaccttcttcaactacattagctttagggaagaagtcttcagaagtagcaggttgatcagtgttagcattagtagcaccttcttcaaccacatcagctttagggaagaaatcttcagaagtagcaggttgatcagtgttagcattagtagcaccttcttcaactacatcagctttagggaagaaatcttcagaagtagcaggttgatcagtgttagcgttagtagcaccttcttcaactacagatgcattgtgagaatttaataattcagtagtagcttcagtgttagtatcagcatttgtattatattctgcggcatccgcatcgtgaccagcagatacgaataataatcccccaattgctactgaagcaataccgacacttaattttctaattgaaaataatgtttttttattcataaaatacgctcccttaattaaaatatttaaattatttaattagtaactaattctatgcaaaatgattataaattgtaaaaaaataaaaacaactagaacttacgatgaatagcaaagaatatattactaattacaatttaatataacataaaaaaatgttgtgtcattaaaaaattacatttttttaatatttttttatataaaataaagattaaacaacaatatttttgattttgtatatttttaaaagtaatatatttaaaattttcagaaggcttatgagtgaatttataggaatagaatacattttaattccacttgactttctatatgaaactcgttaaagtattagcatattattctgacaattctgataggtattagattaataaatttgtaaatactgaggagggaccatgggtttatgtcagtatcaaagataacgtatgagagttttgatggcgatccatttattgactccatttctactgacgacgcgacaaagggtgcctatgaaattttaaaatgggcttatactacgtatggtgaagatatcgtttactcatgtagttttggggcagagagcatggtacttattcatttgatttatcaaattaaaccagatgctcaaattgtatttttagatacagatttacattttcaagaaacatacgatttaattgatagagtaaaagaacgttttcctaagttacgtattgaaatgaagaaaccagaattgacgcttgaagaacaagctgagaaatacaatcctgcattatggaaaaataatccaaatcaatgttgttatattcgtaaaattaaacctttagaagaggtactaggtggtgcgattgcctggatttcaggactacgaagagatcaatctccgactcgtgctaaaacaaatttcattaataaagatgaacgttttaaatcgattaaagtatgtcctttaatttattggacggaagataacgtttgggattatattaaacaacatgatttaccttataatgaacttcatgaccagcattatccaagtattggttgtattccttgtacagcgccagtattcaattctgatgattccagagcaggacgttggtcaagttttgaaaaaacagaatgtggacttcatgttgcagataaaccgtgatgtaaggtttaaaaaattttttatataaaacatagtattctgataaggatttaaaaatattctatattcgatttttactggaaagtcgaatatagattacataatatagagatagtaagtattttaaataaaataaagattgaaatgatagaggtggatgaattgaatctaagtgttactaatagtccttttactgaaggacaagccacacaaattaatgaattattacagacacttacgccagaacaaaaagtatggctaagtggctatttagttgcaaatcaacaacttacatcaggaacatctgagacacaaggttcacaaataggagctatttcaaaggatactgaaacaatgcttcaacaaaatgaaccaacaattcaacctgaaaaacgtgcgattacattattatatggttcagaaacaggaaatgcgcaaggtttagcagaaatatttgaagaacgtctttcaaatattggacataatgtaacgttaaaggcaatggatgaatttaaacctaaaaatcttaaaaatgtcgaagatttatttattattacttccacacaaggtgaaggagatccaccggataatgcagccgagttacatgaatttattcatggtagaaaagcccctaaattagaaggagtaagattttcagtacttgcattaggtgatcaaacctatgaattcttctgccaaacaggtagagattttgataaaaaacttgaagaacttggcgccgaacgattatatgaacgtgttgattgtgatgttgattatgaagaagatgccgaaaaatggatggctaatgtcattaatactattgactcagcacctgaaggtacacaaagtgaacaagttgtaagtgaatcaattaaatctgcgaaagaaaaaaaatactcaaaggcgaatccatatcaagctgaagtattagaaaatattaatttaaatggtagaggatctaataaagaaacacgtcatattgaattcttattagataactttggtgaagaatatgaagtaggagattgcttagtcgttttaccacaaaatgatccagctttagttgaattactgataagtacattaggatgggatccgggagatcaaattcaaatctcagaagatggagatacgatttcattagaagaagcattaacatcttactttgaaattacaaaattaacgaaaccattacttcaaaatgcagcagcatattttgataatgaagcgttagaagacaaagttcaagatagtgagtggatacaaaattatattgaaggtagagattttattgatttactcaatgatttcccacctgaagaattagaacctgaagatttatatcaaatccttagaaaattacctcctagagaatattctatatcaagtagttatcaatcattacctgatgaagttcacattacggttggtgcagtaagatataacacacacggtagagatcgttcaggtgtatgttctgttcaatttgctgaacgtattcaaccaggagatactgttccaatttatcttaaacgtaatccaaactttaaattccctaaagatggagatacacctgtcattatgataggacctggtacaggaattgcaccatttagagcacatatgcaagaacgtgaagaatatggttataaaggtaatacgtggttattcttcggcgatcaacactttactactgatttcttatatcaaacagaatggcaagaatggttaaaagatggtgttcttgaaaaaatgaatgtcgctttctcacgtgatacagatcaaaaagtatatgtacaacatcgcattgctgaacatagtaaagaatttaataagtggttagaaaaaggtgcatcgatctacatttgtggtgatgaaaaaaatatggctaaagatgtacatcaagcgatacgcaatgtattagtgaaagaacaaaatttaactgaagaagatgctgaaagctacttaaaacaaatgaaaaaagataaacgttatcaacgtgacgtgtactaaagaaagggtggagagtgaatggctaaaacgattaaacaaattgctgatgagttaaatgaaaaccttgatgcgttagaacatttaaaaactgaaagtaattatttacgcggtacgattgaagaaggcttagcagatcctttaactggtgccatttctgatgacgatactaaattacttaagtttcatgggagttatcaacaagatgaccgagatgtacgtgatgaacgtcgtaaacaaaaattagaacctgcatatgctttcatgattcgtgtgcgactacctggaggtaaagcaacacctgagcaatggattgcaatggatgatatttctaataattatgcgaatcatacattgaaactcacaacacgtcaaactttccaatttcatggtattttaaaacggaatttaaaatcatctatgaaaaaaattaatgaatcagtgttagatacgattgcagcatgtggggatgtcaatcgtaatacaatgtgtaacccaaatccatatcaatcaaatattaataaagaaatacttgattatgctacagccattagtgatcatttattacctaaaacgaatgcctatcatgaaatttggttagatggagagaaagtgcttgattctaaagaagaagtagagccaatgtacggggaaaaatatttgccacgtaaatttaaaattggtattgccgtaccaccatcaaacgatattgatgtattttcacaagatattggtttaattgcaattgtagaaaatgatgaactcgttggatttaatgtggctattggtggtggcatgggtatgacgcatggtaatccagatacataccctcaagtaggacgcattgctggatttattcctaaagataaagtcatagatgtatgtgaagcattacttacaattcaacgtgatcttggtaatcgttcaaatcgtaaaaatgcacgttttaaatatacagtagatcgttttggtgtagataatattgttaaagaattaaatacacgtctaggctgggaaatcagtgaagctcgcgaatttaaatttgaacataatggcgatcgtttaggttggattgaaggtgaaaaaggtgtatggaattatacattattcattcaaaatggacgtgtaaaagatacagaagactataagttaaaaacggcgttaagagaaattgcagaaacacatactggtgattttagattatctccaaaccaaaatttaattattgctaatgtaactgaagagaaaaaagcagatattcaatctcttattgataaatacggtttaactgatggtaaaaattatagtggtttaagacgtaattcaatggcttgtgtagcatttccaacttgtggtttagcaatggctgaatcagaacgttatttaccaacgctattatctaaaattgaagatttattagatgaagctggtgttagtgaaaaagagattactatacgtatgacaggttgtcctaatggatgtgcacgacctgcattagctgagattgcatttattggtaaagcacctggcaaatataatatgtatttaggtggaagctttaacggtgatcgcttaaataaactatataaagaaaacatcgatgaaaaagaaattctcgaaagcttacgtccaattttaatggattatggaaaatcacgtctcgaaggtgaacatttcggagacttcgttattcgttcgggtgtagtagctaaagttcatgatggtagagattttcacagctaatttttaaagaaatagaaggcgaacggggtgataagatgggaaaggtttatcttgtaggtgcaggacctggtgatcctgatttaataactgtaaaaggtatgaaagcgattcaagcgtcagatgtgattttatatgaccgcttagtgaacaaggaaattttagattttgcaaaacctcacacaaagttcttctattgtggtaaagatccaaataagcattcattgccacaagaggaaacaaatcgtatgttagtgaatttagcgaaaaaagggcacaccattacacgattaaagggtggtgatcctttcgtttttggacgtggtggcgaagaagcagaaatattatcggataatcaaattccatttgaaattgttcctgggattacatcaggaattgcagctcctgcttatgcaggaattcctgttactcacagagattatagttcatccgttgcgtttgttacagctgtgaataaaccaggtatgacgaaagaagcatattgggaacatttagcccatggtcctgaaacattgtgtatttatatgggtgtaaaacgtttgcctgaaatttgtgaactgttagtgcgtcatggtaagtcagtagatacacctgtagcgctagtacatttagggacaacagtttctcaaaaaacagtcactggaacattaggtagcattgtacaatgtgcatctgaaatcaaaaatcctgcaatgattgtgattggtgatgtggtaaatatgcgtcaaaaaattagctggttcaaagaacaagtatcagatgttgaaatgacattaccataatttgaaaaatatctaatataggaggacgacaatatgaaccatatgccgctcatgattgatttaagccagaaatcgattgtcatagtaggtggcggaaaagttgcaacgaaacgagcttcaactttaatcgaatattgtgatgatgttcatattgttagtcctattatttcaacaactttaaaagaactattagataacgaaattatcacttggagccaaaaagaatttgagccacaagatgttgaacatgccgatcttgtagtgattgccacaaataataacgacgtcaatacaaaggtgttagaaagtgttcctcattatgcattatgtaatcatgcttcgaaagcccaagttggaaatgttacgattccaagtattttaaaacgtggaaaactttctattagcgtgtcaaccaatggggcaagtcctaaattgaataaaaaaattatttcaagaataagcgatatgtacgatgaatcatatgaaatgtatattgattttttatatgaaagtagacaactaattaaacgattatcaatcgagccatctaggaaacaggatttattacaacacattttatctgatgagtatttagatgaggttaagcaacgagaattcacacgatggcttcatttacaagtttaggtatgaagggatatgtgatatatgagaaaattgtttatatttgcattagctggatttttagcacaacttgttgatggatcactcggaatgggattcggtgcctcctcatcatccatattattaacatatggaatagcacctgcgattgtttcagcaacggtacatttttcagaaatagcaacgactgctgcatctggtacatcacattggaaatttgaaaatgtacataagccaaccatgttgaaacttgcaataccaggatcaatcagtggatttatcggtgcagcattattaactcaaatacatggtgactatattaaaccttatatagcactattcttactttcaatgggtttttatattttgtatcagttcttatttaaacgtcataaagactttcatacacacgtaggaacacttagtagtgtgaaacttgttccacaaggagccgttgctggttttctagatgctattggtggtggaggctggggaccagtcaatacaccgttgttacttgcaagtcataaaattcaaccacgctatgccattggtacagtgtctgcaagtgaattttttgtaacactttcaacatcattaagttttattatctttttaggatttactcaaattaattggtggtttgtcattgcattaagtataggcggtatgattgccgcaccaatttcagcctatttaactaaaatattacccattaatattttagcaatttgtgtaggtggccttattatttttacaaatagtaatgctttaatgacgtatttcatcaaagatactacagtgataaatgttattcgattcgcaattatttgtgcgattattgtattagttattattactattattcgtaacaaaaaattgtctttttcttataaataaagccgagtaaactaatcaaaataattagaaaaggggttatcaatgatgacaacaaatgaagatattatcaattatacaattaagccacatggtggagagttaattaatcgagttgtagaaggaaaggaaagagaagcattaattgaaaaagcgaacgcttttaaatcattaactttaaatccttggtccatttcagatttagaattaatcgctattggtggttttagtccacttactggatttatgggagaagcggattataaaaaagttgttgaagatacacatcttgaaaatggactagtatggagtattcctatcactttacctgtcactgaaacacaagctaatgaacttaatattggtgatgatattgctttatatggtgaagatggagtactttatggtactttaaaacttgaagaaaaatatacgtatgataaagaaaaagaagctcaaaatgtctacggtacgactgaagaagcgcatccaggtgtcaaaaaagtatatgaaaaagggaacgtttatttagcaggtcctattcaattagtaaatcgtcctaaacatgatgaattttcagattatcatttagatcctgctgaaacacgccaattgtttaaagacttagggtggaaaacagtagtcggatttcaaacacgtaatcctgtccaccgcgcacatgaatatattcaaaaatctgcattagaaattgtagatggtttattattaaatcctttagttggtgaaactaaagcggatgatatcccagcagatgtacgtatggaaagttatcaagctatcttgaaaaattacttccctcaagatagagcacgtttagttatctatcccgcagcgatgcgttatgcaggtccccgtgaagcaattttacatgctacagttcgtaaaaattatggttgtacacactttattgttggacgtgatcacgcaggtgtgggtgattattatggtacttatgaagcacaagaacttatctctcaatttgaagatgaattagatattcatattttaaaatttgaacatgcattttactgcaaaaaatgtagcaatatggctacagctaaaacgtgtccacatgatgcatcagaccatgtacatttaagtggtacaaaagtaagagaaaaattacgtaatggcgaatcattaccaaaagaattctcaagacctgaagttgcagaagtattaattaaaggattaagacaaaagtaatttgggggagtatataatatgagtcaatcaacaaatattacatggcatgattcagaagtaactaaagaagatagacaacaccaaaatggtcataaaagtgctgtcatttggtttacagggttatctggttctggtaagtcaacaatctctgtggcacttgaaaaagcgctatttgaaaaaggtaaacattcatatcgattagatggcgataatgtccgtcacggtttaaataaaaatttaggttttagtccagaagaccgtaaagaaaatattcgtcgtatcggtgaagtaagtaaattgcttgtagatgcagggacaattgcaattactgcatttatttctccatatagagaagatcgtgatgaagtacgtgatattttagaagacggagaattcattgaagtatatacggagtgcagtgtagaagaatgtgagaaacgagaccctaaaggtttatatgaaaaagcacgttcaggtgaaattaaagaatttacaggaattagtgcgccttatgaagcgccaaaacatcctgaaataactattaatactgaaacacaaagtatagatgaatcagttgaacatattcttaattacttaaaagaacacaaatatatttaatgaataaccaaacgagtgagataacgaatttaaaatgaatgttgtctcactcgtttttttgctataaattcttgaaaataatagttaatattcccttattttatgaaataaaacatatttaaaataatcagatatattacaccatctgtaatgacactgttgattaaattgataaaaagactgataataaagcattttgaatgatgtaacaaaagagagatttaattacaaaaaccatcctattattatgattcaattacaaggtattaacaacgcccacaaacgcttgtttatctgataaagtatgtcttgtcgttaattaacgagaaaaaataattcgaagtaatttaatattgagatgtcatttgaaagtagccacgtgataaataaaggaagaatgttttaaatttctaggaggatatttaattatgaaaaaaatcgctacagtaactatcgccacagccggaatcgctacagttggatttgcgcatcatgacgcacatgcagcggaaaataatggatataaccctaatgacccaacttcatatagctactcttatacaattgatcaacaaggtaactatcattacacatggaaaggtaattggagtcctgatcgtttaaatcacactaatgactcaaatcatagtcaatctaactataataattacaacaataatagctataactacaatagcaattattcatatacaacaaacaataaccaaacatctactaacaataatcaatcttatacaactaataatacgacaggtggattaggcgctaacactgcatcaacatcaaatagtaatgtaaaagttacaactcaaagtgcaccaagaacacaatcaactgcttcgactcaagcattttcaggtaaaacaaattcaggtgcgaattactatacttggggtcaatgtacgtattatgtatatgataaagttggtggttcaatcggtaacacttggggtaatgcaaataactgggctaacgcagcagcgcaatctggttatactgtaaacaatacacctaaagcaggtgctgtgatgcaaacaactcaaggtggttatggtcacgttgcatatgttgaaaatgtaaatagtgatggttctgttacagtatctgaaatgaactatcaaggcgtaggtgtagtatctacacgtacaatttcagcaagtcaagcaagttcatacaattacatttcataatttaaggaaataaattatttaaacattaatgtaaaataatggctaagatatttaaacaataatgttatttaaaagagcaagtatatgaattcaaaacgaattctaccttgctctttttttatttttaaaaatcgcatttaatatgatttaaatcgctttataaagggaaatatataactactaattcttatagtgttcaaatataaaggtggtgattcacaatggcgttaggagtacttcaatggatcctagtgatcgcaattgtggtaattacgattggcgtcatatttggtctcatttggggttcgctttttgaggaacgcttttatagaagtcgttctaaaaaagaagaagaagcacgtattgagaaaaatcttaaaatggcaaaaggccataccgatgatgacgtagcatatgatgaagaaggtcgtgcatcactcaacgaagatgataaaaaacaataaatattcataaacctttaagaatccgtttgatttttaaaggttttttcttatcaaaatatttatattaattaactttatgcaattatatacttttaacaaataaaagtgataaaatagatatgttaaaaaattcacatgaattatttaaagttaggagttattataatgctactgtttatagtagaaattatcataatgattgtagccattatgctaggattgcgcacagcaggtgctttaggctgtggtatttttgctattgtggcccaactgattatgatatttggttttcaacttcctcctggttctgcccctgttacagcagtcctaattattctggcaattggtatagctggaggaacgttacaagctacaggcggaattgattatcttgtctatcttgcttcgaaaatcattgaacggtttccaaaatcaattatttttattgcaccgatgattgtatttgtcttcgtatttggagtagggactgcaaacattgctttatcactagaacctattattgctcaaaccgcagtaaaagctaaaatccaacctaagcgaccactcattgcttcagtattaactgctaatttggctttactttgtagtccagctgcatccgcaacagcctatgtcatttcagtacttgcaggtcatgacatttcaatgggtcaatatttgagtatcgtcttacctacatcattaatcactatgtttatgttaagtatattttgtacgtttgtaggacgtaaaaatacaattactgaaagtgaaattgcccatacacctgacgttgaagtaaatcatgctttttctactagagtaaagataggtgttttagcatttattttatgtgtgtttggtattcttacatttggtatttttcctcaattcatgccttcgtttaatgtcaatggaaaagatgtcactgtatcaatgacagagattgtacaattctttatgtatttaagtgcagcaattaatttattgatgttaaaagtgaatacgagtgatattctctcttcaaatattacacaatctgctattggcgcattatttgcagtactcggacctggttggttaggtgcgacagtatttaacgcacctcataatttacatatcatacaaaatgatgttggcaaaacgattcaacatatgccctggcttgtgattattcttgtagctgtagtagcgatgattgttatttcacaaacagcaacagcatcgattatggtccccatcgtcatgagtatgggaattccacccatgtattttgtagcaatggtacaaacattaaatgttaactttgttatacctgcgcaaccaacgttattattcgcagttaatttagatgaaacaggacgtacacgacctacaagctttattattccaggattctttgcaataggtatttcagttattgttggttttataataaaaataatattaggatattagtttataatagagtattattcatataaacgatgtaaagtttcatgaaaatttaatagattgagaagaccttttgtgcctttttgaatattgaagagaagaatgtgaattctattatgaattgcattcttctcttatttttaatttaaaacagagaatttcaaaaaaatatatattcattaaaagtgaataaaaattcaatgtttataatttaatatttgtttaaaacgtttatttttaatttaacactattgatatagttaaatttttcgatagttttaatggaataaaatatataaatattcagttttgctcaaataattttatgaatgtaatttgcatttttatttaattttagatattgtcatcatgtggttcattcacgtaaatacattataagtcgtacatataatattcaaaggaggatcttagttgaaaaaagaaaaaataatggattggcccacctttataggtactgttattgtcttacttgcagcagttatatctatgatggtctttccaagtgcaagtgagaaagttattactgatataaatagtgctatttctaactcgataggatctgtttacttatttataggtttagctgttttatcctttgtactctatattgctttcggccgatatggtaatgtgactttaggaaaagcaagtgataaacctgaattcaataattttagttgggctgcaatgctattttgtgcaggtattggttcagatattctttattggggtgttatcgaatgggccttctattatcaggtacctccaaatggggctaaaggaatgactgatgaggcgcttacatatgcaacgcaatatggtatgtttcattggggacctattgcatgggcaatttatgtattaccagctttgcctattggctatttagtatttgtaaagaaacaaccagtatataaaattagtcaagcttgtcgtccagtactgaaaggacaaactgataaatttttaggtaaattagtagatatcttatttatatttggactattaggaggagcggcaacctctttagcattaggtgtgccattaatttcttctggaattgaacgattaacaggtatagatggagacaatatggttattcgctcaattatacttttcacaatcacagtcatttttgcaattagttcttatactggtttaaaaaaaggaatacaaaaattaagtgatattaacgtatggttatcattcttactacttgcatttgtatttattgtaggtccaacaatttttattatggaaaccactttaactggctttgggaatatgatgcgagatttcttccatatggcaacatggatggagccatttggtggaattagaaaccgtaaagaaacaaatttccctcaagattggacgatattttattggtcatggtggcttgtatatgccccatttattggtttatttattgctcgaatttcaaaaggtcgtcgtctcaaagaagtcatattaggaacaattgcttatggtacattgggatgtgtcttattctttggtatttttggtaactatgccgtttatttacaaattagtggacagtttaatgtggttgattttttaaataaacatagtactgaagcaacaattatagaggttatgcaccaattgccaatgggttctttaattatagtgttgttcttaatatctgcatttttattcttagcaacgacttttgattcaggttcttatattttagcagctgcttctcagaagaaggtaataggggaaccattaaaagcgaatcgtttattctgggctttcgctttatgtctattacctttctcccttatgttagttggtggagaacgagctcttgaagtgttaaagactgcttcattattagcaagtgtaccacttctatttatatttacgtttatgatgatatcctttattatcacacttaataaagatcggattaaactggaaacaagagcagataaactaaaagaagtagaacgacgttcacttcgtattgttcaagttaaatcagatcctgaagacgataatttataatgtgaaaaatgatagtacatttaaaaatcctcagaaattagataataaatctaatttctgaggatttttgaatcatattgataatgaagtaagttataaatcttcttcttttggtataggataatgttcgaaaatgtctccagattcaatcgcagagcttaaattttttaaccatttataatataattttgtgtggttcaattgggattgtatactatctattttttctttttcttcttcacttaaattattagtttgtattatgttgtgaagaatgttttctgcttttttcgtcgcttctaaatttgtatcgacttcacgttcccatttttgtgtgaaaaagtttcgaaaaaaaataaaaaaatctttctcggctataaaatgttgtttgcgactgccacgggtaaattgttgcttaacgatatcgtattcttgcaatttttttacaccagcactcatactaggcttgctcatttgtaaatgttcacgcatttcatcaagcgtcatactaccttcaaaaaccatcgtaccgtaaagattaccaacactacggtttgtaccatataaatccatggtttcaccaattgagttaataactaaatctttcgcttcctctattttttgattaatattattagaattgctcatattgcacctcacttattttcatcttcataagatgtgaaatattaacacaaattttacattctcactcattatatggttttttcttaagagtttcaaaagtcaattttaatccctacaatattaaaaataatataaaaaaatatataaagatgatttttgcaatgacttaagaaatatgataagctacttttgtaaaatttgttaaataaaaatttaacaaacttaacggaggtagtatgatggaacttgtaaaagcattgtctaatcgtcaatatatcaatggtgaatgggtagagagcgctaacaaaaatactagagatattattaatccatataatcaagaagtgatttttactgttactgaagggactaaggaagatgcagaacaggctattttagcagcacgtcgttcatttgaaaatggtgagtggtcacaagaaacaagtgaagtcagaggtaaaaaagtaagagcaattgctgataaaattacagaaaatcgtgacgaattagccaaattagaaacgttagataccggtaaaacattagaggaatcttatgcagatatggatgatattgcaaatgtgtttaattattttgcaggtttggcggataaagacggaggagaaattattgattctccaatacctaacactgaaagtaaacttgtcaaagaacctgtaggtgtagttacacaaattacgccttggaattatccattattacaagcttcatggaaaattgcacctgcattagcaactggttgctcattagtaatgaaaccaagtgaaattacgccattaacaacaattcgtgtatttgaattaatggaagaagttggattccctaaaggggttatcaacctaatattaagtagtggtgaagaagtaggagatacattatcaggtcataaagaagttgatttagtatcatttacgggtggaattgaaactggtaaacacattatgaagaatgctgcaaatcatgtaactaatattgcattagagcttggcggaaagaatccaaatattatttttgatgatgctgattttgaattagctgtagatcaagcattaaatggcggatatttccatgcaggtcaagtttgttcagcaggttcaagaattttagtgcataacgatattaaagataaatttgaaaaagcattaattgaacgtgttggaaaaattaaattaggtaatggatttgatagtgatacagaaatgggtccagtgatttctctagaacatcgagataaaattgaaaaatatatgaaagttgctaaagatgatggtgcaaccattgctatcggtgggaaacgtccagacgatgaagatttaaaagatggtttattctttgaaccaactgtaatcactaattgcgatactcatatgagaattgttcaagaagaagtatttggtcctgttgttacagtagaagggttcgataatgaagaagaagcgattgcactcgctaatgattcaatttatggtttagcaggtgcagtattttctaaagatataggaaaagcacaacgtgtagctaataaattaaaactaggcacagtttggattaatgacttccatccttacttcgctcaagcgccatggggtggttataaacaatctggtattggacgtgagttaggtaaagaaggattagaagaatatttaatctctaaacatattcttacaaatagaaatccagaacctgtaaatttctttagtaaataacttttacaatttaactataaaggaccgtaggcgtattattttacggtccatttattttgaagtataaagatgtatcaaatcaaactaaattgtatttaaatagaagatttatatttttaggggaggacgacaatatatgagtaaaaatcaatcatatgattacgtaattattggtggaggaagcgctggatcagtattaggaaatcgtttgtcagaagataaaaataaagaagtacttgtactagaggcaggacgtagtgattatccatgggatttatttatacaaatgccggcagcattgatgtttccttcaggaaatccattttacgattggagataccaaactgaagaagaaccgcatatgggacgtaaggtagaccatgctcgaggtaaagtattaggtggttcaagttcaattaatggcatgatttatcaacgtggtaatccaatggattatgaaggctgggctgaaccagaaggaatggaaacttgggactttgcacattgtttaccttattttaaaaaactagaaaaaacatttggagctgcgccatatgataaatatagaggacatgatggtccgattaaattaaaacgtgggccagccacaaatccattatttaaatcattcttcgatgcaggtgttgaagcaggttatcataaaacaaacgacgtcaatggatatagacaagaaggctttggtccatttgatagccaagtacataatggtcgtcgtgtttcagcttcacgtgcctatttacgtcctgcaatgaagcgtaaaaatttaacagttaaaacacgtgcatttgttactaaaatacattttgaaggtaagaaagctactggtgtaacgtttaaacgtaatggtaaacttcatactgtgaatgccggtgaagtgattctttcaggtggtgcatttaatacacctcagttattgcaattgtctggtatcggtgattctgaattcttaaaatctaaaggtatagaaccacgcatgcacttacctggtgttggagaaaacttcgaagaccatttagaagtatatattcaacataaatgtaagcagccagtttcactacaaccaagcttagatgtaaaacgtatgccttggattggattacaatggatatttgcacgtaaaggtgcagcagcttcaaaccactttgaaggtggcgcttttgttagatctaacaatcaagttgcatatccaaatttaatgttccatttcttaccgattgctgtaagatatgatggtcaaaaagcaccagtggcgcatgggtatcaagtacatgttggtcctatgtattcaaattcacgtggtagtttaaaaattaaatcaaaagatccttttgaaaaaccaagtattgtattcaattatttatcaacaaaagaagataaacaagaatgggttgaagcaattcgagtagcacgtaatattctatctcaacctgcgatggatccatataatggcggtgaaatctcaccaggaccatctgtacaaacagatgaagaaattcttgattgggtacgtaaagatggcgaaactgctttacatccttcttgtagtgctaaaatgggaccagcgtcagatccaatggcagttgtagatccattaactatgaaagtacatggtatggaaaatttacgtgttgttgatgcgtctgctatgcctcgcactactaatggtaatattcatgcaccagttttaatgctcgctgaaaaagcagctgatatcattcgtggtaaaaaaccattagaaccacaatatgttgattactataaacatggtgttagtgatgaaaacgctggagcaatggaattcgatccatactataaacattaataaaatatttatatgaaataagggttggaatcaaagatgattctgacctttttattttaaatatccccttctacaacatttttaatacgtaaaggcatataatgaatgaaagagaaggagtgaaatgaaatgattaaagatttagtgcaacgtttacaagataaggaaaaacgtatgatcgaggttcgcagacatttacatgaatatcctgagctatcatttcatgaaactgagacacccaaatatattgctaatttttataaagataaagattgtaaggtagaaacaaatataggacaaaatggtgtaaaagtgacgatagatagtggtaaacctgggaaaacgattgctattcgagcagattttgatgcgcttcccattcaagaagatactggtttatcatttgtttctaaaaacgagggagtcatgcatgcgtgtggacatgatgcacatacagcatatatgcttattttggcagaaacattgatagaaatgaaatctcagttcagtggcaaagtaattgttattcatcaacccgctgaagaaatgccacctggtggagctaaaggtatgattgaagatggcgtattggatggcgtggaccatgttttaggtacccatgtgatgactaatatggcgcctggtaaagtctattatcataagggtaacgttcaaacaggacgttcttactttaaattaattgtaaaaggtgaaggaggacatggttcttctccgcatactgcaaatgatgcgattatagcgggagctcatttcgttactaccgctcaaacagtggtctcacgtcgtcttaatccatttgaaacgggtgtcgtcacaattggatcatttgatggtaaaggtcaatttaatgtgattaaagataaagtaaccattgaaggtgacgttcgcgctttgacagatgctacacgtgatcgtattgaaacggctttaaaacaaatggttcacggtttggaagaaacatttggtgtaaattgtgagtttacatttagtaaagattatcctgcattgtataatgatcctgactttactgaatatgttgcagaaacaattaaacagtcaaaattagctgatgttaaaggcgtagaaatatgtgaacctcaaccgccatctgaagatttcgctttttatgctaaaacattgccaagtacttttatatattctggagcaaaacctagaaagggtaaagcatatccacatcatcatcctaaatttacgattgatgaatcaagtatgttagttgcagcagaagcagtaggtgctgtggtattaaactatctaactattgaataagcagtcatactatattatatatttataagaaatcaatttacatttttaaagtagaagtcgagttgatattctagtattaaagaatgtgtcatgatagtattattctatatctagatattggggtgagttgatgagtttctatgattttatgcaaggatttattgatgataagaccccattaggtgaacttgcatcatggataaatcaagaccaagattttccaaaacatgaatatcttgctgaaaatatacttgattacttttctaagatgtcgatgttagatcatgaatgcttagaaattgttaaacgttccctttcgttatatgaaggaagatagatgtgaatagcaaaaataaaaaatgatagcttaaagctagttaagaaatgaaggaacaaagaaatgactttaactgatagttataaaacatatgtcatagaagaaaaagaagatcaaacgatgtctatcgaaaaaaataatgatgttcaattatatacagtacttgagtcaataaatgagttaacaaacgattcaatgtgtgttttaaatcacttgtttgttaatgaaggtaatgaacctcaatttgaatctaaatttttaaagcgcactaaatatttacaagatgtgccaggattcaaagctttacgttttttacgtcctcaaactaagcatcgtcattatattattttgacgttatggaaagatcgacaatcgttctatgattggcaaagttcagacgcttatggtaaaacgcataaacaaagaggcactaaacaaggtgtcgataataaaatagttaatcgcgatttatcttataatgtaagaatagaacttgctaatttagaaacgagtattgatatagataatatgtttaatattcaaagattaagtttctaaaaaagtaatatactggtatagaaacttaatcttttttatatttaaaacaaataccgcgtagaattgcatgaaattaagatgtatgattttatgaacaatgaagacttaaaaattggaaggaaagtaaagtaatgaatcatttaaatttattagcaccagaaacatataatattgtatctgaaatagaaaaacatgcttcaaatcaaaataaacaagcaattatttatgaaaatggtgtagaagaacccattagtgtgacatactctgaattaattaaaaacgctaataaagtaggacatgtattattaaaccatggactaaaaaaaggcgataaagtgttaatcatgatgccacgtgctatcatcacgtatgaactttatattgcagcattaaaattaggtattgcaattatcccgagttctgaaatgttaagaacaaaagatttacaatatcgtattacgcatggagaaattaatgcagttattgcgttagctgattttatagaagaatttagagacattaaagaatatcatgaattaacaaaatttgttgttaatggaaatgaagagaattggattagtattgaagaggaaaaagtaaagcaaagtgatgaattagacacagcaaatacaacaagagatgatgttgctattttatcttatacttctggaactacaggtaatccaaaagctgttacacattctcatggttggggatatgctcatatgaaaatggcacctgaacattggttagctataaaagaagatgacttggtgtgggcaacagctgcacctggttggcaaaaatgggtatggagtccattcctatctattatgggatcaggagcgacagcatttgtgtataatggtaaatttaatccttctcgttatttatcattattacaaaaatttaaaattaatgtgctttgttgtacaccaacagaataccgtatgatggcaaaattagataacttagataaatacaatttagatcatttacacagtgcagtatctgcaggagaaccattaaatagagaagtagttgaacaattccgtaaacattttaatttaacagtgcgtgatggatatggacaaacagaaagtacgctattaattggtttcttaaaagatacagaacaacgtcctggttctatgggtaaagctattcctggtagtcgtgtagcagttgttgatgatgagggaaacaaagtggatacaaatgtaaaaggtaatatagcattaccacttgatttccctggattatttaaaggttactttaaagatgagaaacgtacaaaagatgcacatgcaggagattattatattactggagatttagcacatatcgatgaagatggttatttctggtttgaaggtcgccgtgacgatattattattagttctggctatactattggacctttcgaagttgaagatgcactcacaaatcatgaagcggtaaaagaatgtgcagttgtagcaagtccacatccaattcgtggcaatattgttaaagcatttattattttaaaagagggttataaaccaagtgatgatttagtgaaagagttacaaactttctctaaaaaagtagtcgcaccatataaatatccacgggcgattgaatttgtagaagatttacccaaaacaaactctggcaaaattcgtcgtgttgaattacgcgaagcagaacgcacaaaacataacaacgctcaaaataaataatcatatgcatcacactgataaattagtatgtcactaatttatcagtgtttttttatgatgagcatactgatgtatcagataacatcaatgttggaaatatgtctatatttaaaaaaattgaaaataaagataattttaattgtatttcatgcattattatgacatacttttaaataattagtatgacataataaaaatttgaggtgatttataatgactaaatatatttatgcatttgatgaaggacaaaaatcaatgagagatttattgggaggtaaaggagctaatctatctgaaatgaaacgcttaggtttacctgtaccagatggtttcaccattaccacaacagcatgtattgagtatttaaaacaagggaagtcattatctactgagatcaaaacagaattaattgatcacttggcttcattttcagagagaaccggaaaaatcttctcttctgatacgaatttattgcttgtttctgtaagaagtggggcaaaaatttctatgccaggaatgatggatacaatattaaacttgggtttaaatgatgaaaatgtagaaaaattagctgaaaaaactggggataaacgttttgcttatgactgttatcgtcgtttattacaaatgtttggtgaagtcgtatatagtgtgcctatgcaagcatttgatacatatttcgaacagtataaaaaacaacatcattttgagaatgacgctgccattagtgcagatggtttaaaagaaatttgtaagcgctttaaagagatatatgtagaagaagtacatcaacctttcccgcaagagcctttgaaacaactggaagaagctatagaagctgtatttaaatcttgggataatgatcgtgctcgtatttaccgagatttaaatgatattccacacgacattggtacagcagtaaatatccaagaaatggttttcggtaatagtggagataatagtgggacaggcgttgcttttacacgtaatccagtgactggcgaaaataaattatttggtgaatatttgcttaatgcgcaaggagaagatgttgttgcaggtattcgtacacctaaagatatctcaacattacacgatcaaatgccagaggttcatcaagaatttgtagatgtgacaaaacaattagaaaaacattataaagatatgcaagatattgaatttacaattgaaaatggacaattatatttactccaaactcgtaatggtaaacgtacagcacgtgcggctattcaaattgctgtagatttagtgaatgaagacattattactaaaaaagaagcaatgaaaaaagttgaagtaaaatcaattgatcaacttttacatcctaatttcgatgagtcttcattaaaagaagcaacagttgtatctaaaatgggattgccagcgagcccaggtgctgcaacaggtcaaattgtatttactgctgaagaggcgaaagcacaatcagagcaaggtaaaaaggtgatcttgatgagaccagaaacgtctcctgaagatattgaaggtatgattgcaagtgaagcgattgtaaccacacatggtggcatgacgtctcatgcagcagttgtagctcgtggaatgggtaaatgttgtgtgacaggatgttctgatttagaaattaatacgagtgctaagacggtatactatggcgatcaaacactacatgaaggagatatggtttcagttgatggttcagaaggtgacatttatttaggtgagattaaaacagtcaatgctgagcatagtgagtcattcaatcaatttatggagtggtcagaaaaaacagctcgtttaaaagtacgtatgaatgcagaaacacctcaagatattaaagtaggttaccaatttggcgctaaaggcatcggattagtacgtacagagcatatgttctttggggctgagcgactagtagagatgagacgtttcattctatcatcctctcgtgaagatcgtctcgaagcacttaatcatattaaacaatatcaagtagaagactttaaagaaatttttaaattatcaggtgaacatcctaccatagtgcgtttacttgatccgccattgcatgagttcttaccacattctgaggaagatattgcgaatgttgcgaagcaattaaatataccgaaggaaacattagataaacgcattgtggatttaaacgaagtgaatccaatgcttggacatcgtggttgtcgtttagcaatcacataccctgagttatatgaaatgcaagtagaagcgattattgaaagtgtatttaaattaaaagaagaaggcattcagtgtaaaccagaaattatgattccgttagtgtctacagtagaagaatttaccactttaaaagaaaaccttgttaagacgattacccaattagaaaaacaacatcagaaaagcgtagattacttaatgggaacaatgatcgaaacgcctcgtgcatgtcttatttcagacgaattagcaaaacattgtgatttcttcagctttggtacgaacgatttaacacaattgtcatttggtttttctagagatgatgcagggaagtttataaatgtgtatactgaaagaaatatattgaaacttgacccgttccaaacattagataaagatggcgttggaaaactaattgaagtggcagttaaacaggcaaagaaagtgaacgaaaatattaagattggtgtatgtggtgaattaggtggagatgcgaaatctattcattatttcaatcacttatcaattgattatgtatcatgttcaccattccgaattccaggagcaattttagcgactgctcaaagtcaagtggaggaaagtgagtaatcaaaaatgaatgaagtcgagtcacaagcgcataatttaaaattgtttattgtttcagattcaattggagaaactgctcaacgtatgattcatgcaaccttaacccagtttccagatttaaataatgtagaaataaaaaaatttccttatattaaagatgaggaagaatttttaaatatattaaatttagcgaaagaacacaacgcaatagtagctacgacattagtaagtgaatcatttaatgcacttggtcacgaatttgctagagaacatgatatcccatatgtagattatatgtctgatttaattagcattgttgaacacgtgacaggtgaaaaaccattgatggaaagtggtgcattaagaaagttaaatgaagcttattttaagcgtattgaagccattgaatattcagttaaatatgatgatggtaagcatttttctgatataggtgaagcagatgcattgattgtaggggtatcacgtacttcaaagacaccattaagtatgtatttagcgaataaaggctacaaaatagcaaacattcctttagtacctgaagttagtattccagacagtgtttttaagcaaaaagggttacaagtatttggattaactgcaagtccacagtatattgcaaatatacgaaaaagtcgtgctgaaacattaggtttgtcaaaagcgtctcaatataataatttaaatcgtataaaagaagaactcagttatgcagaagaagtatttaaaaaattaaatgctacagtgattaatactgagtataaatcaattgaagaatcagctttttatattgaaaagtttttacaaaataataaataatcatcatataaggttgtaagtaaatcattaagtgattgtaatgacatcatgttataataaaactttgatcattcaactaaacattcttactgtttagcttatattgataaatctttctgcttaatttaatgataatgaattcattaattcaaataattaagtttttctgatttacaattgacaatatttgttttaacatagtaatgaaagacttaacacattactaaaaacaatatattgattactaaatattagggaaacaagagcaacaggtaattatattatattgtgaaacataatttttggagaggtgtacaaacatgacagaatcaaaagatatgattattgtcggtgctggtgtaattagtacaacagttgcatctatgttcaatgaacttgtacctaactggaacatcgatctttatgaacgtttagatcgtccaggtattgaaagttcaaatgaacgtaacaatgctggtactggtcacgctgcattatgtgaattaaactatactgtaagacaaccagatggtacgattgacattgaaaaagcaaaagaaattaatgaacaatttgaaatttctaaacaattttggggtcatttagtagaatcagaacaaattaaagatcctagagatttcattcatcctttaccacatatcagtttcgtacgtggtaaaaacaacgttcaattcctaaaagaacgttacgaaaaaatgaaagatttcccaatgttcgatgatatcgaatatactgaagacatcgaagtaatgagaaaatggattccattaatgatgcaaggtcgtttcgatgatggcttaatggctgctagtaaaatcgacgaaggtactgacgttaactacggtgaattaactcgtaaaatggcacataacttacaaaacgacgattcaaacgtaaacgtcaactataatcatgaagtacaagacttcaaacgtttatctaacggtaaatggcaagttaaaattaaagacttagctaacaataaagtctttactaaagaagctgaccatgtattcatcggtgctggtggtggatctattccattattacaaaaaactggtatcgaagaaggtaaacatatcggtggtttcccaatcattggtcaatttatcgcttgtacaaatccagaagttatcgaacaacatgatgcgaaagtttatggtaaagagccacctggcacaccaccaatgactgttcctcacttagatactcgttatatcgatggtgaaagaacattattattcggaccattcgcaaatgttggtcctaaattcttaattcacggttctaacttagatttattcaaatcagttaaaccacacaatatcactacgttattagctgcagcagttaagaatatgtcattacttaaatattcatttgaccaaatcatcatgactaaagaaggttgtatgaaccacttacgtacgttctaccctgaagctcgtgatgaagattggcaagtatatactgctggtacacgtgtacaagttattaaagatgatgaaaaagaaggtaaaggattcatccaattcggtacagaagtggttgactctaaagaccactctatcattgctttacttggtgaatcaccaggggcttctacatcagtttcagtagcgttagaagttatcgaaagaaacttcgaacaatatttagatgaatggaaaccaaaaatcaaaaaaatgattccttcatatggtgaatcattaattcatgatgttgacttaatgagaaaaactcgtcgtttaacatctaaacaattagaattaggtttctatgaaaatactaatgctaaataagaaaaattaaaaaactgttaacaggacatcacgttctgttaacagtttttttattaaataaatttaatggttataactgcttaaaaacatgaaaaaagtgatgagcacgttactcatcacttttgaataaaaatctgactattaatttttatttactgaagcatcgtagattgaatctactgcatcgcctaaagctttatcaaattcttcttttgattggcctgcacgtaaatcacttgctaatgcacgtgagaagcttgcaattaattcatcattgtcttttaataatttgtttgcttcgtctctgctgtaaccaccagataatacaacaacacgaacaacatttggatgatcagctaattctttgtataagttagctttagtagggatagttaattttaacattactaattgatcatcatttaaagaatctaagccttttttaagttcagcttttaatacttcttcgatttcagctttgtctttagcgttaatgtttacttcaggttcaatgataggtactaaacctttagcaatgatttttttagcaatttcaaattgttgttcaacaacgtctttgataccttgttcatttaattctaagatgttagaacgcattttagtaccgaagatatgacgttcaactgcacggtctaaagtttcatctaagttgtcgataggtttcattaattggacaccattttgctcttcagctaaacctttgtcgacttttaagaaaggaacgacacctttatcagctaagtagtcaccagtatatttaccttcaacttcacgatccatagtttgttcaaatagaatcgcacctaaaattttatctgaagtaaatgaaggtgaagtgacaacacgtgtacgcatatcatgtacaagttggaacatttcgtcatcattgctgtattgatcttcgtttacaccatattcttttaatgcttttggagtactaccaccactttggtctaatgcagcgatgaatcctttcccatgacttactttttctaattgttctttattcattatgcctttcactcctttaataaactttcaatattattatcgtaaaaaataataatattctcaagtataaagtaattaattattgaaatttcttaattaacaatttacaattttatgaaattaccgtattttatacatttaatgtaaacattcaaacatattcaaaggggattgttatgaaacaacgtatattaattattggtagccctggttctggaaaatcaacattggcatatcaactacacttaaaatatcaactgccactttaccatattgatcaaattcaatggcttaataataaaaacgtcattacttttgaagaattaaaacaaaaacttgaatctattgtagtaaaagaggaatggattattgatggaaatgattctagtacacttagtatgagattaaaatatgcaactaaagtcatatggattaaagaaccaaaagtaaaatgtatatttagagtaatcaagcgttacatatattcactatttaaaagagaacatatcggaggaaatcctaaaacattaagttttgaatttattaagtatatttgggattttcctaaaaataatgagcaatttatcatgcaacaaatgaaaagatcaataccaaatgttcagtggatcatcgatgattctaaagcattatctttacgttttctttaaaaaatataaactaatttctttaaaattttaatatatgtaattattaaatagaatattttataaaactttagtgtattgtatattttttgttgaaatatgctattctaaaataagttaagttcttattaattgaagttagtctttatttttaaatcgtttatatatgataactaagttcttaattaatacgtatatactttcttggaggaacagtaatgaagaaaaataaaatttttgctgtattaacaacaagtgctctattactggctgcttgtagtaatggagataatgcatctgatagtggacaaaaagatggaaatcagaaaaatgagcaatctagtaataaaagtggtaatagtcaaagtgatgcattgaaaaagaataatgataaaaatacaaatgaaaataaagtagattatcctaaagatggtgttaaagggatttatgtaacaagtaattctacacagggcaaaaaaatggatgagttagttaaattcatcaaagattctaatttaaataccatggttattgatgtgaaagatgatacaggtaacattactatgaaattaaatactggcaataaacaagtggataaaaatacgcttgatattgtagatggtaaaaaattattaaaaaaactgcatgataataatatttacccaattgcacgtattgtaacatttaaagatacaaaattagcaaatgaacaccctgaatggacattcaaaaatagtgatggttctgtttggacaaatggtaaaggggatagctttgttaatccatttatgaaggaagtatggaagtatgatattgatgttgcaaaagcaggcttccaagatattcaatttgactatgtacgcttccctgaaggatttgaaaatcaagcggatagcttaacgtataataaaggggaatataaaaatagtcagatgagttcaggcgaccaacgtgtagatacaattactaaattcttagaatatgcaaataaagaattaaaaccaatgggcgtcaatgtgtcagctgatgtatttggttattctgcattagttgaaaatgcacctggtattggtcaaagtttccctaaaatctctaaaaatgtagatgccatttcatcaatgatttatccatctcattggagcaatggagatttcggtttacaagcaccagatacggaaccatataaaacagttaatcgttatattcaaaaagaaaatagtttattagatacattaggtaaagataagcctatttcaagaccatggattcaagactttaccgcttcatatttaggtgctggcaattatattgattatgatacaaaagcgatatctgaagaagttcaagctttaaaagataacggggttaatgaattcttattatggaatgccggtaatgattatacagaaggtgttaattataatcctaaaaaaggtaatgctaaagaacaagaccctgaaggtgtagaacaaactaatgacaaagatgatcaacattctgatagtcaagataatgaacaagcggataataaaaataaataatatggagacaatttctcgtatattcatttagtatggaaatgatttatcttgtagactatttaaacgaaaggaatgcgtcagaattcattttgaattccttgacgcattcctttttttatttattagaaatgttcagtagataaataagaatgactatgatgtttttgttttagtaataatgaagttcccataactaatagaagtgaggctaaaagttgaattgagtgttgttgtgtatcgtcaccagtacttgggagtgttttaacagaagattgtgaggtttgagtatctttaagtgacttagatgatggcacctcagaagaagcaaccgttcctacataataacggttgagttcacgtgcacaatcaacagaattaacttgtttatgattagaagaggttgttttagcggctttagcgatacctgattctgcatgaatgcgtgtatcttgaagttgattaaagtcactatatctaccatttttgtactcaacttcgccatttttatgaactttatacattccattgccttcatttaatctattatgacttataatttcaaagtagtctcctttgtcaacagtacgacccaatcgttgtaggtttggattacctccactattagataatgcatctgtagcaatttgtttaacattatctttagtcactaagttagcaggatgtgcttctacagagtgagtcattgtaagtagcattgtacttgttaaaagtgtagatgcaacgaaagatactttcttcataatgaaaaccccatttcattcatgatcaattacaactagagtgtagcatttaaatagatcagaaacagggttttaaaaaaaatcataataaatctttaacttaacttaaagaataaataatttgtaaacattaaatcaatatttatcacatgatttatataggacattaatacttctttttagaaaaatatggaatagaacaagccattaaaatcataaaaataatatgagcaatcatccataaaccgtattcattccagctaaagtgaaagaatgaacgctttgccataacgacgagtgacggataaagagaggcaaaaacaatcattaataagacataacttattttatataatggtttaaagacgtgataaataagtaagaaaataaaatatattaaccatcctataaaaacatgaatggctagttctaataataacggcgttttgcttggatcaattaagaaatcgatgttaattaacaataaagtaagatgagtcgattgaactatgccatccatgatagtcattgtaattaataagataatacttataactaaagcactaagacaatgataaaaataacggatcataattttccttccttcttatatacatactataagaatattccctgaaatattagatttaacactttttaaatttttagaatattgaaaaaacatgttgaccaaagtttaaatcaatgataagttattaataattcaataatctattaactcttatcaagagtggtggagggatgtgccctacgaaacccagcaaccgtcattgtatgacatggtgctaattcacataaagttaatcatactttagaagatgagagaaagtgtgtcgatgctttctcttaatagttgaaagtatttttttatgtctttacatatctagtaagaggaaatgagaattgaaaatttataaaaaggtgtcaatacatatgaaaaaattaataggtatgatcagtattttgttagtaacgataacgctagcagcttgtggaaatcagaaagaagataataaaaaaattaccgtagcagcgtcgccagcacctcatggtgatgtgttaaaaaaagctaaggaagaaatgaagaaaaaaggatatgatttagaagtcaaagaagttaatgattataaggtgcctaataaattgttagataaaggcgatgttgatgcgaacttcttccaacatgtcccatatttgaatgctgaaaagaaaagtcatggttataaaattgaagaattagataaagtgtttacgacgcctatgggtgtatatagtaaaaaatataaaaatttaaaagacattccagatggatcgacgatttacgtttctaataatcctgcagaagaaggacgttttttatctttctttgttaatgaaggattaattaaattaaaaaaaggcgttaaaattgaaaatgcaaaatttgaggatattgctgaaaataaaaaacacttgaaatttaaccatcaacaaggtgcagagtttttaccaaaaacatataagaatggtgaaggagctgcagtcattataaattcaaactatgcgcttgataatggtttaaaaccgtctaaagatgctattgttatggaaggtaaatcatcaccatttgcgaatacgattgccgttcaagaaggtcataaaaatgatgaaaaattccaaacattattaaaagttatgcaatctaaaaaaatcaaagcgtatattaaaaaagaatatggcaatgatgttattccatacgaaaacaaataagtcataaaaggtctctattagaggccttttgtgatttatatttatcattgtttaaaagatagaaaaatatattttaatttttctgaaaatatttacaaatctgacaattattagtaagatattgattattatcacaagaattgaagtcaataaagaaagttagacataagttgttgatactttgggagaggatgagtcaatttgagtaaagcagaggatatgataaaagaagatagtaagtattttgctacttcaggacgtataaaatattatccattagtgattgatcatggatatggagcaactttagtagatatagatggaaaagaatacatcgatttgttagctagtgcaagctcacaaaatgtgggtcatgcaccaaaacaggtaacagaggcgattaaaaagcaagtagataaatttattcattatacccccgcatatatgtatcacgagcctttagtgaaactgtctaaaaagttatgcgatattgcgccaggtgattatgaaaaacgtgtcacatttggtttgagtggttcggatgcgaatgatggtattatcaaatttgcacgtgcttatacaggacgaccctatattatcagctttacaaatgcttatcatggctctacatttggagcgttatcaatgtcggctatcagtttaaatatgcgtaaatattatggccctttattaaatggtttttatcatattccatttccagataaatacagagggatgtttgaacaatctaaatcaaacactgttgaagagtatttagcgccattgaaagagatgtttgctaaatatgttccagctgaggaagtagcttgtattgtgttagaaacgattcaaggagatggtggattattagaaccagtagaaggctattttgaagcacttgaagcgttatgtcgagaatacggtattttaattgctgttgatgatatccaacaaggattaggtcgtacaggttcttggagctctgtggaccactttaactttacaccagatctcattacatttggtaaatcattagcaggtggattaccaatgtcagcgattgtgggtcgaaaagaaattattgaaagtcttgaagcaccagcacatctatttacgacaggagcaaatccagtaagttgtgaagcggctcttgctacgattgaaatgatagaaaatgacgacttactaacagttagttctaaaaaaggaaactacgtgcgtcaacgtatgaatcaatgggtagatcaatacgattacgtaggagatgtgcgcggtattgggttatctattggaattgatattgttaaagacaaacagtcaaaagaaagagctgctgaagaagtattgaaaatttgtaattactgttttgaacatggtgtagtgattattgcagttgctgggaacgtcttacgttttcaaccgccactcgtgattacttatgaacagttagataaagcgttagatgttattgaagaagcgcttcaagcactacaagatggcgatttaaatgaatatagtatagaaggacaaggttggtaaaatatattaaaagagcaagaaaagacgttaagtgaatgtcttttcttgctctttttcagtatacttcccttaaaaaacaaatgaatgtttctaaagggggtatgagaaatataagtgagttcattattttaatcttttggtacgacataatcatcttcatcattctttttagaatgtttaataccatagaatacataaatcacaataccaactaagaaccagattaatgtataaagtttagcttcaaaacttaatccccagaatacaagcaagactaataaaaaggtaatgacaggtaatacagggaagaacggtactttaaatgctggaactggtaaatctttgccttcacgttttcttaaactatacattgcaatagatacaaacataaatgcgattaatgtacctgctgaaattaattgagctaagaaagcaaatgggaacattgaaccaattaaaacaccgataatagtgagaataacaagcgctctattaggtaaatgtttatcatttaatttggctaaccaagaaggtaataatccgtcacgaccaaatgaataaagtaaacgtgaaccagctaacatcataccgattaatgctgtaaacataccgatgactgaaatagattgaactactgctgctactacaccatgtccactttgacgaagtgcccaaccaacaggttcagcattcccagcatattttgaataatggaacataccaactaatactaaagctactgctacgaataaaacaatcgcaatgattaatgatcctaaaataccacgtggcatcgttttttgcggattaatagcttcagctgagttggcagcaattgaatcaaatcctatgtatgccaagaaaatcattgatacacctgcataaataccttgccatccaccaaaatcaccagttgcagtgactttatgctcaggaataaatggaacataattacttgcttgaattgctgttaatccaacaataacgaataaaacaatcgctagaacttttaaaataacaagaatattttcgatacgagcagcttcactcataccacgagataataataatgcagttaaaataataacaattgctgcaactaagtctataattcctccatttgcaccaaaagggttagataaagacttaggtaacgcaatacctaaaggagacacaagtcctcttaaattggctgaaaaaccagaagctacaaaggcaacggcaataaagtattcggcaagtaatgcccaaccagctacccatccaaagaattcaccaaataaaacgttaatccaagaatatgcagaaccagcaaaaggcatggctgcagccatttcagcatatgaaaatgcaactaaaccagcaacaattgcagctaataagaaagataaagctacagctgggccagcatgctctgctgctactacaccaggtaaagtgaaaatggatgttgatacaatagtacctacacctaatgcaagaaaatctttaacacgtaaagtacgttttaaatgtccatctttattttgatagatagtgggatcttcttttctagtaaaatttttgaaaaaactggccataattatgaacctccactaataagtttaaaatttaattaattagcttgttagctatataacatttattatcatagcataaaagaatagtattttgtctaaaatttctaaaaatttcaatttttcttacttttaattaaacaagaatgcctaactagaaaatttaaatgatagatttgattatatcagataaatctaaaataaaaacaacaaaaaagagtatatttactctaaaaatataaaaagtagtaattatatcaatattggcactataattatagaagacaagtcaagtcattagacctttttaattgtgtcattttacaatggttaaagtatattgacctattccaatatggaatggttactatcgaaaatatgtattttattaatgtttcgatgcgtactataataagaaacgtaataaagttacaacgtattcaaatgttctaataagtatgtcttactatcattcccttaaacatgacatatataatagaaaactcccatctcatatttgaatatgtttaattaactgagattacacttcaactttaaaaattgaagttatttaaatataaagaagccgcaattaacatgtgactaagtctttccctctttttccctaaaaaaatagacatgtgtgtggcttctttttaattgggtataaaaaaatagaaaagtaattttgaaataaaaactttaaattacaaatgtaaacttgaaaggatatgaatataaaatggctaaagaaaactattctgccgcagatatggtcattgatactttaaaaaataataatgtggattatgtatttggtattccaggtgcaaaaatcgactatttattcgatgcattagaagatgatggcccagaacttatcgttacgcgtcatgaacaaaatgctgcaatgatggcacaaggcgttggacgtttaacaggtaaacctggtgttgcattagtaacaagtggtccaggggtaagtaacttaacaactggattattaacagctacttcagaaggtgaccctgtattagcaatcggtggtcaagttaaacgaaatgatttattacgtcttactcaccaagctgtagataacgctgcgttactaaaatcatcaactaaatatagtgcagaggttcaagatcctgaatcattatctgaagttatgacaaatgcaatccgcactgcaacttctggtaaaaatggtgcaagtttcattagtattccacaagacgttatttcatctcaagtgcaaagtaaagcaatcgacttaccagaaaaacctcatttaggcgtaccaacagatgaagaagtgaatgaagtgcttcaagcaattaaagatgctaaattccctgtattacttgcaggtatgagaagttctagtgaaaaagaaacagaagcaattcgtaaatttgttgaaaaaacaagcttacctgttgtagaaactttccaaggcgctggtgtaattagtcgtgaattagaagatcatttctttggtcgtgttggtttattccgtaaccaagtgggtgacgaattactaagaaaagctgatttagtagttgcaatcggttatgatccaattgaatacgaagcaagtaactggaataaagaattagatactgaaattatctcaattgacgaagtacatgctgaaattacaaattacttacgtcctaaaaaagaattagtaggtaatattgcaggtacaattcaaatgatgtcagaaaaagtatctgaaccaattattgatcaaaaacatttagatgacttagaagaattaagagcaaatattatcgaagctactggtattaaatatgaacatgaagatggtattttacatccagtagaaattattaatacaatgcaaaaaacgttaactgatgatacaactgttacagtagacgtaggtagtcattatatttggatggctcgtaaatttagaagttacaatccaagacacttattattcagtaacggtatgcaaactttaggtgttgcgttaccatgggctatagcagctgcattagtacgtccaaacacacaagttgtgtcagttgctggtgatggtggtttcttattctcaggtcaagatttagaaactgctgtacgtaaaaaattaaatatcattcaattaatttggaatgatggtaaatataacatggttgaattccaagaagaaatgaaatataaacgtgcagctggcgtagcatttggtccagtagattatgttaaatatgcagagtcatttggtgcgaaaggtatccgagtaacaagcccagaagaacttgaagctgcaattaaagaaggttacgaaacagaaggacctgttttaattgatattccagtaaattataaagataatattaaattatcaacaaatatgttaccagattctttaaattaattttctaaaaataggagtgaatattaatatgggtcatgtattatatcaacatggtacattaggtacattgatggcaggtttattagaaggaactgccacaattgatgaattattaaaacatggtgattcaggactagcaacacttacaggttcagacggtgaagttatcttcattaatggagaagcttaccatgcaaatgaaaaaaaagaattcgttaaacttaaaggtgatgaattaacaccttttgcaacaattactaaatttgaagcagatgaatcttatgaaacttctaataaagattctgaaacagtgttaaatgaagtaaaagaacatatgttaagtgataatttattctcagcagtaaaaatcactggtaaatttaaaaaaatgcatgttcgtatgatgccaaaacaagaaccaccatatacaagattaattgattcagcacgtagacaacctgaagaaactcaggaagatgttaacggtacagtgattggcttctttacacctgaattattccatggcattggttctggtggtttccatattcatttcgccaacgatgatcgtaatttcggtggacacattttagattttgaagtagatgatgtaaaagttgaaattcaaaactttgaaacatttgaacaacacttcccaatcgataataaaacgttcactaatactgaaattgattatgcagatatcgatgcagaaatcagagaagctgaataatatattatcattagagttcgaatcttttaagattcgaactttttttattttgataaaataatattttaagcaattcaatttaatggtataataatttcgaattttatgtttatggagatatataggatgcaatgttcaaattgtggtcatttatatcaacaaggagatttattttgtggagaatgtgagacaaaattagatcagattacactatctacaacagcaacatcagaattattaaacttggatagtcatgtaaacaaaaatataaatcactctacttcaaattctgttaattagtcaattcgatgattttggagtactacgtagattatttggaagtcgttttagtggcttattgtaagcattgtggaagtaaattcgtttcagttcaaaatgtatgtactcaatatggtacgtgtgtcattaatgaatttaagcaatcaccatctttaagaaataatataaaaaaatacagatagcaataaaaattttcaaagaaatagaagaatatgctactaaaaaagttcaagatatagtgaatcgatagtatctgatatatccttattgtataagtcccaaactaacaataatatataatattttataaggagaaatgagaaatgttaaatgctgaacctataattaagaagatgaaaaatcaaaaaatcaattatgataaggtattgaaaaaactgattagtcaatgggagcgtgaaggcgttcgtcctaaaattttattacatagctgttgtgcaccttgtagcacatatacattagaatatctatctcaatatgcagatattgctatttatttcgctaatcctaatattcatcctaaaaatgaatacttaagacgtgccaaagtccaagcacaatttgtaaaagattttaatgagaagactggacattcggtaaaatatattgaagctgattatcagccatatgaatttatgaagatggcgaaatcgcgtggtcttactgatgaacctgaaggtggaaaacgttgtacagcgtgttttgagatgcgtttagagcttgtcgcagaagcagcattgaagtatggatatgattatttcggtagtgcattaacattatctcctaaaaagaatgctcaattaattaacgaactcggcatggaagttcaacgattatacaatacatattatttacctagtgattttaagaaaaataaaggttatgaacgatctatagaaatgtgtaatgattataatatatttagacaatgttattgcggatgtgtatttgcagcaatggagcaaggtattgattttaaaaaaattaatcgagaagctaaaacatttttagaacaattttaaaaaggagtaagagagaatgagttaaacattctttcttactccttcgcttttatttataacgtacgatggataaaacgcacaatagctaaaatagcaataacaagggtagatagtagtccagcaatttttatgcctttcttctctttttcaggttcaggatctttattttccatcatttctaatagttcacgttcaatttcaagatccaaagctgttttcttttcaccattgtaaccgatactattatcgtattcttgagaagatttggcgtcttcaatgttatgcttatctttagtttgtgactctgtttgtttagtttctatagtcatcaatatgcccttcgatagtacatgctacgtgtaatattagtatagtgcactttatcgtttagtgaaataatttaacgtctagcatctagtccaataatctcactaatattactataatggtttgcttttaaatatttagcaatatctcgattaatctttttagttaaaccagggccttctatcacgagggatgagtagatttgtacaagtgacgcaccatttcgcatcatttgaatagtatcttgtgcactaaaaataccacctgtaccaatgattaaaaattcgccattcgtttgttgataagcccattttacaagttttaaattacgtttaaataaaggtcgaccacttaaacctccgtcttctactttatttggagaagataatccaccacgttgacgtgtggtattggctaaaatcataccatcaaaggtttctgtaatttgaggtaaaatagttttaaaaccttcaagttctaaatctgaagttagctttaaaaagattgggacattcacttcgtgttgtgctttataatctgttaaagcatgacataacattgaaaattcatctttatcatggaaactttgtaagttttcagtattaggtgagctaatattcacagtgaaaaatgatacatctgctttaaaggcatcgatgactttaatataatcttgataacgctcttcgtaaggtgtcgttttattaacacccacatttaaacctacaggaatagtgtaagcatgacgtcttaaattccataaagctttattcatacccatattattaaagcccatacgattgattaaggcatcatcttcaagtaagcgatacatacgcggtttaggattgccatcttgtggtttaggtgtaatgccaccaagttcaagagcaccgaaaccagcattttcaagtgctttaggcacttcacatgatttatcaaaaccagcagctaaaccaactggatttttaaatgttatccctttaatgttttgtgaaagagaggggtgttcatatgtaaataatttatttacaaaaggtagtaaaaaagcgtttttctgagtgaattttaaggcatctactgttaatccatgtgccttttcaggttcgattttgaataaaagaggtttaattaatttgtacataataatgctccatttcattgtatttgaggcttacgatcctcatttaatatcattgaaaaaacattcttttaatagactagcacgttcgcttaaaaatgaatagtctaatttgaaagtgtttgaaaaattgcctaactttatatcattttggaatgacaaaggttaaagcacatccatttaggtaatagaatagtagataaagaattggactaaggaggataattaatgaaatcagaatggaaaaatcaattacctttagaaggtattcaagatatttcaccagtaagcggtggagatgtaaatgaagcatttaaaattacaacaaacgatgatatatattttttattagttcaaagaaatcgtaaatcctctttctacgctgccgaaatagctggactagaggcatttgaaaaagcagatattacagcaccaagagtgattgaaaatggcgaaattaatggcgatgcgtatctattactcagttatttagaagaaggcagtaaaggcagtcaaaaagaattaggacaacttgtagccaaaatgcatagtcatcaacagtcagaaggtaagtttggattcgagttaccttatgaaggggctgatgtctcatttgataatacatggtcagagtcttggagtgaaattttcgtagaacgtcgtatggatcatttaagagatgaactattacgtaaaaatttatggaacgaagaagataataaagtatacgaacaagtacgttctgttatgattaatgaattaaaaaatcataacagtaaaccgtctcttttacacggtgatttatggggtggtaattatatgtttttaaaagatggacgtcctgccttatttgattcagcaccgttatatggagatagagaatttgacctaggtatcactactgtcttcggtggatttacacaagaattttataatgaatatgaaaaacattatcctttaggaaaaggagcagaaaaacgtttagagttttatagattatatttattcatggtgcatttagttaaatttggtggtatgtatgcaagtagtgtgaatcgctcaatggatcaaatattagcctaatagaaaacttcgggttaagtcttcttaatccgaagttttttatttcgtctttaatgaagtcatcatatcattagatgttaaaacgaacgatgaagtggatgaattaatgcataaagtggaagcattaggtggtaaggtgattgatgaacctaagacttctcaaggatattatggtgcaacatttgctgatccagatggacataaatataatttcttagtttgttagttcaattaattttataaaatacgccaattaatatacgccccaaagttagaatgagatctaatggtggggcgcatttttaatgaaaaagttatcatgaagacgtttttttatctttatatagattcatataaatgatagaaataatgattaaaatcgcgccggttatgaatttaggcgttaatggtaaagggaaaaacggaaaagaaaatataaatacaaatataggattgagggttcttataatattcgcttcacgaaacgaaatgtatttcaaaccttcataaaataataaaagtcctattacgccactacacaaagcagaaagtaaaatagagaacaagcctatgcttatatgtatggtatgtaaatgattagtcacaattaatatgatacctagcaacaaagtagaagtcgcctgattgtacagtaagatggttttagaatcaatgtctttgacggtctttttagctaacatattcgttagcgcaaaaaagaatgtataagatagggtggcaatcacacctaatatactgttaaaatcacctgaaaaatgagtaatcaagaatgaacctataacagcaaaaattataggaagggtatcgtttttgcacaacgtttcatttagaaagagcactgaaagaaacaacgcaaatataatataaaatcttcctaataatccaacactaactggatctaacaaacttaaacttacatattggagtaaaatacctattgtattagtaatacctaagagccatataaatttgttatgatagatttttattttacttttatcgagtaatacagttattaataatattaaagttgaaaacaaagcattaaaaaaacttgcttgaataggtgataaatcagtgagtgaaagtttgtttaatattggggttaaagacatgattgctacggaaataatattaaataaatacccttttttaactttattcatggtatgcccctaaatatttaaaaatttcttcatataacccatcttgaaatgataataactttttgtctaatggttctttcgtaagtattctttcagtagtttctgaatatttcggtatatctttaaaatagcttacttcagcttttgtaattgtagtggtatggccatttggtagtatatagtaacctaaatagtttatatcactttcattgatgacagcgccagactcttcataagcctctctgatagctgtctcattcatcgtttcattatggtttaccttacctcctgttaattcccatgctctttttttatttttaacaaacacaagatgtccttgataggttaaaacaattaaaacagaatcatattttgtaactgtctcattaaattgaagtttgatatgatttataatcatttatatctacctcctttatgaggtagatataactgtagaatccaaaatttttattaaaaacatttaatatttgatcaattgatgaaatcagtttaaaactgattgagtcgttcttaaaagtctttcgtagttcagtatttcgtgagactactttaaaaccatatttattagctatcttttctaaatcatttacgctatattccgtttgataaccaaatttccaaacttttaataaaatttttattttcttatctaaaataccaaacgaatatttatttggtgtcattaatataaggtgtccattagttttcaatactctatacatttcattcatgactttataagggtttagaaaatgttctataacacctaatgaaataactgtatcaaatgtattttgagggtaaggtaatttttgaacatctccaataacatacttaaatttgattccagttttaatcatatactcagttgcaatactttttgcattttcagaaatatcaataccatgtccttcaattttatatttctcaataagtttgaataggatggccccatccccgcatccagcttctaatactttatcgcctggactaaaataatattcattataaataaatgtttttaatttatcttttgctctttcaattcttgatggtgggaaattatatgattctttgttgttagaaaacttccatacattttcccaatggtgtttacttgatactttattcatagatgcaccttcttagttgttttatatattattatatatttattttatataatatcataattattatcgtgataagttatgatgtttgattctatacctgaatatatcttataaataaacatttgtggcttgaactattctacgatagactatgaaatatatttgttgagtggtatatagaatcagttgcataaacgaacataaatgagaaatcacttcattaagtagttttaattattaaaatcaaagaattactttatagtttccctaggaaagggtttcaacaaaatgagctgtgattcaattaagaactttactcaaaatatggacataaaaaatctgccctcaaagtcagaactttgaaggcagtctaagtcttgataataaaattttagttttcttgaatgttgccgtattcttctcttaaggcatacactttatctggtgtaacgtcttggccaagtggatcgacaactttcatcgttgagaacgtatgaagtacttgacctcttatcatacctaaatattcttgtcttaattgatgttgttcttgtttttcttcaacgctcaaactttcaactttttctttattttctaattgattaattctttctaataattctctcattatttcttcctcctaattggtatgagctggaaaatggggtgtaatatatgttccaacttcttctataagtgcttcgatatcacgatcattatttgtaaatcttaagataatatgatttgtattaatggattcataagcttttaatatttgtagtaaatttttacgtccagtacggaaaccacctttgattggtttaacggtttcgtttggattttgggataaatcaatcattaggatattcataaacggtttgaatcggtcagtcccactgtgccaagcttcaactaatttcttttgatcttgaaaaggttgagcgtaaaatagccaaccatccatatgttgttgtaaccaggagatggactgtcttgagtagcctgtaccaaacatcggaatcgtacgatgtttaggcaatacttgtaacccagaatcttcatataattcaaaaatcgaatttgaaatttggggtgaatgtgattgccaaagcgctcttaatgattgaacggttgtttgataacgttctgttaatgcactttcatctactttaaatgcagggaattcaaaagcgcgatcaccggtagccataccgagtaataaacgttgattggaaataagatcaagcgaggctgctgatttagctaaatggataggatgacgtagtgttgccacaatactgctggtcccaagtgcaatttttgaggtaaacgcacttaaatacgttaggaaaacaaatgggtcataattttcagttacgggtcctaaatgaggactataaagtggattatctctcacgaataaacttgtaaatcctaatcgttcagcttgttgtgcaaacttcacttgttcattaaaatcaatatgctctttatttttactatcaaatggtagggatagacctaatgttaatttatgatttttaaaggtacgtttaaaaccctcatgattttctatcttggacatatcacccctcctaactaaactttatctaaacaacactcataatctaaacaacaagtgttgtttataatatgacgtaaataatcattttatgcaagtcgcatgcttttctataaaataacacttacaatcattaagactgtaagtgttgtttatagcattataaatttgtaatatggtgaagtaaaaatggtaagttttgatcaataaattgctcagcacttagttcacttgtatctaaccaatgtcttgctaatccacataaaccagcggctaaaaagcttgcgctattttcaataatactagaatcgtgctcgggatatttatgttgtaacatgagcgtaaagatatcttctaactcgttattaatgcatttatgagcatggttacaaaatgtctcacgattgagtttgcaagcattttgtacattttccaaataatatgctatcgagacaaataatttagagataatctgaccattgagcgtttctgaaatagacaacgtttctttaatatctttaagaatagtcattgataatgaataatctaatatttcatatttatcattaaagtgtgcataaaatgtagcccgattaacagtagcacggtcagtaatattttttactgtaatttgggtcatttctttttcttgtgacacatttagaaatgcttctacgagtaattgttttgtacgtatgactcttggatcaactttattgcttggcacaaagacacccctttcattttaaaatgtgattactttaaattattaaacgaacaaagaaggttgtcaaagagtatgattaatcgttctgttttaaactattataatagaagaaactcattttttctttttaaattacatacatattattggtcaaaattcttaaaatatccataaaaccagaaaaatttaagaaaatgataaaataaatattctgaaaatttagaaaatgtgttatagtattttttatcattacttaatacaacaacaaaatattataggaggtataagaatgacaacagaacttagaaaaataagcgttggagattttatttttagagtactttccggagtggctattgggattgtggtaggtttagtaccgaatgccattttaggtgaaatctttaaagcacttatgcatcaccatcctatttttgcaacattactacatgttgttcaagcattacaatttactgtaccagcattagtaggtgcgttaattgcaattaaatttaatatgactcctcttgcgattgcagtcgtatcaagtgcagcttatgtaggaagtggcgctgctcaatttaagaatggggcttggattattgcaggtattggtgacctcatcaatacgatgattactgcagcaattgcagttttatttattctacttattgaaaaacgtgtaggaagtatggcattgattgtttatccaacaattgttggaggtctctcagctacaattggtgtgctcatcctaccatatgtacatactataaatattgcgattggtaatatgattaatagtttcactgaattacaacctgtattgatgtgtatgttaatctcaatggtatttagttttattattatttccccattatcaacagtagctattgctattgccattggtattacaggtttagcagcaggttcagcttcaattggtatttcagctactgaagctgttttacttattggcacaagtcaagtaaatcgtgttgcagtgccaatttctattttttttggtggcgtgaaaatgatgatgccaaatatggtgaaatatccaattattatgttacctattttgattaccgcagcgatttctggtgtagtgggtagtcttatcggtattgctggaacaaaagaatctgcaggatttggatttattggcatgattgggccgattagtgcatttaaatttttacatgtcgattcagccgttatgagtatcctcctaattattattggtttttttgttgtacctttagtaacagcatttatactagatgttattttacgcagagtcttaaaattatttacaaatgatatttacaaatttatgggataaacgtattaagcctgggacatgatgaattgtctcaggcatttttaaatttaaatgataaacgtcaataatgttacaataaaatagaaaaaagattaaaaggatgaagggttaatggcgaaaaaaattgaagctttagcattaaaaacagcagaattaacacgacgtacacatgaactaggcattccagtgatgatattatttgaaggtgtacctgcatctgggaagacgcgcttatctaatgagttattattaaatttagatgcgaagtatacacaatttattgcgacacagtcacctaaacaggatgatttaagatatcaatttttacaaaaatattggaataccttacctaaaaaaggtgatataaatatttattttagaagctggtattctcattatctagattatagagaaaataaaattaaacacgacaaatataaaaactatgatgtactcaaacaacaaatttcttcttttgaaaatatgcttaaacaagatcactatgaaatcattaagtttttcatagaaattaatgaagaaaagcgtcaagaacatattcaacaaaccaaagataacccattgacgcgttggaaagttcaagaatatagtaatgtacttccaacagatatttaccttaaagatatgcgtcaatttataaaaaatgataaagcatgggaaatcattgattataccgaaagagaaaaagcaatcgaaacaatgtatgaacatattatcaaacatcttgaaacagcgattgagaagcatgagcaaaaagaagaacagcgagacggtaaatttcattctaattttaaaacacacctttttgatagaaaggtggataaagtaaaaaaagatgaatataaacagctcatcgaggaattacaaaatcgtatgagagaaattcaattcgctttatatgatagaaagattccgcttattttagtatttgaaggtatggatgcagctggtaaaggtggaattattaaacgaattagagaaaaattagatccaacgggttatcgagtgaatgccattagtgtccctacagatgttgaattaaaacatcattatttatggagatttgcgaaggaaatgccaagaacagggcacatcgaattattcgatagaagttggtatggtcgtgtattggtagagcgtgtcgaaggttttgctactatcgatgaatggcaacgtgcatatgatgaaataaacgcatttgagaaaatgtggacagatgaaggagcgattattttaaaattcttccttacattagataaagaagaacaattaaaacgttttaaagatcgtcaagaaaatgttaataaacaatggaaaattacagatgaagactggcgaaatagagaaaaatgggatttatacgtggaatcaagtcacgatatggttgagaaaacaaatacatcctatgcaccatggcttgttgtccctgctgatcataaaaaaacctctcgtattgagatactaaaatatattattcgtaattgtgaaaaggtactttggggagtaaaagattattaaaaataaataaggaaatttaatacgtgcaagctcttgttttttatcaaaagtaaagaatttaaatagccaattacattttaaaaatattacagtaatgtaacaaaacattaatttgtaatatgactaatgacgttaaagtattgtaaattttgtaagaaagtattgtaaaacgttaatttataataaaaataaactccatattgatagtttttttatattacaagaagtaattaatatgtttcaatattacaaaatgatggattaattgtaattttttgtaaaacaagtgtaatactattctacaaattttgtgttatagtagctattgtcaaaagttaaataacaaatcaaaacagaaattaatcttaaataaagaatgaaacataacgaaaatatatatttcaattttggaggaattatctattatgaaaaagacagtaatcgcttcgtcattagcagtaactttaggtttaacaggatatgctttaacaaacgatcacagtgcacatgcatctgaacaaacaactaactattctcatttagctgacttagctcaaaataacccatctgaattaaatgctcacccagtacaagctggtgcatataacatttcattcgtaaaagacggttttaaatataacttcacttcaaatggtaacacttggtcttggaactacacttacgctggtggtgctgacacagctcaatcaactactgactacactgagtcttataatcaagcttcaactcaatcagtaagttcaaataatcaagctagcacttcaaatgtaaaagctgtttcagctccagtacaaagaacttctagctacaataactacagtgctcgtacaacttcatactcagcaccaaaaactacttcatactcaactgcttcaactggtggatcagttaaagctcaattcttagctaacggtggtactgaagctgcttggaatgctattgtaatgcctgaatcaggtggtaatccaaatgctgttaacccaattggttacagaggtttaggtcaaactaaagaagcatggggtactggttcagtagctacacaaactcaaggtatggctaactatgctaaatcacgttatggttcatgggatgcagcaattgctttccgccaaggtcacggttggtggtaagatttaagtagataactggataggacatcgagttattaaaaaaggaggacgacaatgtcgtcctcctttttttattttttaatataatatttttaatttcttgcttagtacatatcaaactactttcttttaatgattaattattttaattataattaatataactatattgaaagagggtgatatgaattgagtataaacaaaatagtgaaattaggattatatcatagtgtatattggtcggttactcaaatgtcgctatctcacttatttacaaaagtgcctcgttctttttttgatacatatcatcattggtttaaaacatttccatttgaacaaggtgggcagttatggaatcgtctttttcttattaatagatggaaagggtatattccagaaggagaatgcctaaataaaaatgtttataataagcatgttttgaaaccactaactcaagaaagtgtttataaaatgattatcgaaatgagacgagctgaattagtacattggctttctatattgccagttattgtctttgtaaaagcacctaaatgtattaaaacaataaatatactatatgctttattagcaaatgtaccgattatattgacacaacgttataatcgaccaagattagagagatattaccaattaaagtacaagagaggtatggatgatggcgaataaaacaattgtcgttattggcggtggattaggaggtatatcagctgctatacgtttagcgcaaagtggttatcacgtagatttatttgaaaaaaatacacatataggtggtaaagtgaatcgattagaaaccgaaggatttggtttcgatttaggcccttctatcctaactatgcctcatatttttgaaaatttattttaccatagtaataaagaaatggcagattatgtgacaattgaacgcttaccacttcaatggcgtagtttttttacaaatggtaaagtgattgacttatatgaagatttagaacagacggaaaataagaatagccatttaacagactatgatattcagcaattatctaattttctaaattatgcagaaaaaatacatcgatttactgaagatggatacttcgctttaggtttagatacggtaacggacattcttaaatatcagggtccttttaaatctttaaaaggtgtagattatttttcaacaatgcaacaagcgattaatcgatatataaacaaacctgaacttcaagatatgttaggatattttatcaaatatgttggatcgtcttcatatgatgcacctgctgtattaactatgttagtacatatgcagtatgaacaaggattatggtatgtcaaaggtggtattcatcatttagccaatgctttagaacgacttgctgaagaagcaggggttcagattcataaaggtattgacgtaacaagcattgatacctatttcaatcaagtcataggagtaagacttgataatggtcagcacattcatgctgattacattgtctctaatagagaagtcataccaacgtatcgagatctacttcatttttccgataaaaagttggaaaagttagaaaaaacatttgaacccgctagttctggttatgtgatgcatttaggtgttaatacatcttatcctcaattggctcatcacaacttcttattttcaaataattctaaacaaaattatcatgaagtttttcatgagaaagtgttaccacaagaccctaccatttatctcgttaatagtaataaaacagacaaagcacaagctcctaagggatatgaaaatttaaaagtactaccgcatattccgtatatccaagatcaaccgtttactaaagaacaatatgatgaatttcgagaaagagttttagataaactagaacacatgggtttaaccaatttaagagaacatattatttatgaagatgtatggacacctcatgatattgagagcaattacgcatcgaatagaggtgccatttatggagtagtggcagataaaaagaaaaacaaaggttttaaatttcctaaacaaagtcaatattttgataatttattctttgttggcggttctgtcaacccaggtggaggtatgccaatggtaacactgagtggacaacaagtagcagataaaattaatgccatagaagagacgaaattattaaaatatcagccttaaggagacactcaatgatgaaacgattagctaaactattatacccattactcggtgcttcaatagcgagcggatactttatgtataatcgtcaacgactacttcaatataataaaaaaacaactaagaaaaattatccatctatcagtattattattccggctagagatgaagaagttcgattaccacgcttattgacgagcttaaatcaacagtctatctctccagaaattattgtgatgaatgatggatctaaagataatactagagtagtagcattatcttacggtgctaaagtaatagatgtcgtagaaggtgacgatgcacgatggtatggtaaatcgtttgcttgttatcaaggtgttcagtatgcaacgtcagatatttttatctttatagatgctgatgtacagctattagattcacatgctttagaatctatattacaagcttatgaaaaacaatcatatcgtggactattaagtattcaaccctatcatctcgtcaaaaaagcatatgaacagttttcagctttatttaatttgatgacagttgttggaatgaatcaattttcaagtttatctcatcataagcaaacattagcatttggtccagttacagtaatgaagaaagaggattacgttttaacccaaggtcataaaaatgctgaatgtcatattattgaaggatttgctcttgctcaagctttctcgaaatataatctacctgtatcctgttatgaaggtaaaggttttgtaggatttagaatgtatgaggaaggggctaaatcactgatacaaggttggacaaaacattttgcgactggtgcttctggaactgaaggtacgataatgttgatgattatgacatggatgatgggaataacatttagtcacaccttattgttgctcagttttattacgaaaaccgtatcaaaaaaatggggaggattatcttacttcttatatcttattcaatttataagactacataagcgtgtagggagtttttcaatattatttttaatcatgaatccattattatttatagtgtttgtatttgtatttataaattcatattgtcagacacattttactaaaaacgtaagatggaaagggcgcacttttaaaattaattaaatatgtaaagtataacagggggacgcttcatgagttttgtagaagaaagttatcagtactgtcataaaataatgaaagattattctaaaagtttttcatttgcatttgatttattaccagagcgacaacgacgagctatctgggcgatttattccgtttgtcggattattgacgatagtattgatattcatcaagatgtcgattatttatataaaattaaacaggacgtaaaacgtatcgagcgtcaatcagatattcaaaaatcgtttgaaagtgatcaacatattatgactgcttttgcagatacagctcaaacatttccaatgaattactatgcattatatgaattaatagatactgttatgaatgatcaatcctttacaatgtttgatactgatgatgccttaatggagtattgttacggcgtcgctggaacagttggtgtattacttatacctgtattatctacttctcctacaaaagaaacatatgaaaatggaaaacaactaggggaagctttacaactaacaaatatacttcgagatgtaggtgaagattatcacaacggacgtgtttatttaagtatcgaacgattagaacaatgtggcgtatcaatggatgatgaaatgaatagtggcccttctgaaaaatataaaaaattgtgggaatattatgcaacgattgcggagaatgactatgaagcggtacttaatcatctagatgtgtatgacaaagaagcacgttttattatagaattagcagctcgcgtatataaaagcattcttgatgagacaaggaaagcgaattacacatttagtcagcgtgtttacgtttccaaatggaaaaagaatcatatttatcgtgaattaatgaaagaatataaagtaaaagaataggtgggaagtttatggatattgccgttataggcgcaggaatcactggattggcgtcagcagcacgattagcttcacaaggacatcatgtgacaatatttgagaagaatggaaaagttggaggaagaatgaaccaacttaaaaaagatggttttacttttgacttaggtccaactattgttatggtacctgatgtatataaagctatatttgaggagtgcggcaaacactttgaaaattatattgatatgcaccaattgtcacatatttttgatatctatttttcagataaagataaagtaagtgtctctacagatttacctcaattaagtcagactttagaagcgattgaaccaggttctacacatggatttatgtcatttttaacagatgtctataaacgttatgacattgcacgtaagtatttcttagagcgcactttccgcaaaccaagtgaattttataatccgattgctttatatagaggcatgaaattaagaacacttggtaaagcaaatcatcttattgatagctatgttaaaaatgaaaagattcgtaaattacttgcttttcaaacactatatatagggatcgatccaaagcaaggtccttcaatttattcaattatcccaatgatagaaatgatgcatggcgtatattatatcaaaggtggtatgtatagctttgctaaaggtcttcatcgtcttacacaagatttaggagtcagtattgaattaaattcagacgttcaagaaattattatagaccctaaatttaaacgtgtggatggtttaagagtgaacggagatattcgtcgttttgataaagtattatgtacggcagacttcccatatgcagcgcaacatcttatgccaagtcattctccacttaagaaatatacacctgctaagatagataaaatggattattcatgttctgcatttttaatttatgcaggaataaacagagatttgaaagataaagttcatttgcataatgtgatttttgctgaagattttagagggaatattgacgatatctttgaaggaagattgccgaaagacccttctatatatctttatttcccctccgttgaagatgaggaattggctcctgaaggaaaaacaagtatgtacattttaatgccagtacctgagcttaaaacaggtcaaatcgattggaacaatccagccataattgaacaggttaaaaatgaaatttacaaaaaaacagaaacaattgaatcacttaaaggattacgtaacgatatcgtatccgaaactatttttacacccttagattttgaaacacattataatgctaaattcggtacagcctttggattaatgcctactttagcacaaagcaattattaccgtccgcctaatgtgtcccgtgattataaagatttatattttgcaggcgcaagtacacatccaggcgcaggcgtacccattgtattaacaagtgctaaaataacagcagaggctatgttagaagatataaaaaatatgaaatagaataaataaatctgaaaattgacaattatcagtgtaatgttaaaataagacttaatacgtaagaacttatcgagagaagtgaagggatttggcccaatgaaacttcagcaacaggcttcataaatataaagtactgtgctaattccaagaggataataaataacctcaaagataagtgacatatatcttatgaagctatatgccacacaaaagtggtatatagctttttatttaaggaggaataacatggttatttcaaaaagattagcagccattcctgatagctattttggaaaaacgatgggccgtagagtagaacatggccctttaccacttattaatatggcagtaggcattcccgatggtgaaacaccagaaggtattattgagcatttttctgaagcgattcgctttcctgaaaatcaaaaatatggtgcctttcatggtaaagaatcatttaaagaggccattgttaatttttaccaacgtcagtacaatgtgacattagataaggaagatgaagtatgtattttatatggtacaaaaaatggattagtagcgttacctacatgtgttgttaatcctggagaaaatgtgctacttccagatcctggatatacagattatttagcaggagtgatgcttgcaggtgccaatcctgttccattaaatttagatcctccagattatttgccaaattgggataatgtagataagagagtactagacaacacaacgcttgtttatttaacgtatcccaataatccaacaggatcaacggctacaaaagaagtatttgatgaagcaattgaacgattcaaaggtacaaagacaaaaatcgtgcacgactttgcttatagtgcttttggctttgatgctaaaaatccaagcatacttgcttcagaacacggtaaagatgtcgccattgaaattttctcactttcaaaaggatataatatgtcaggtttcagagtagggtttgcagtaggaaataaagacatgattcaagcattaaagaaatatcaaacgcatacaaatgctggaatgtttggtgcgttacaagatgcagcgacgtatgcacttaatcattatgatgaatttttagaagaacagaatgaaacatttaaacggcgtcgagataagtttgaagcaaaattaagtgaagcccatctaccatttgtgcattctaaaggcggtatctattcatggttacgtacacctccagattatgatagtgaaacctttgaacaatatttattaaaagagaaatctattttagttgctccaggtataccatttggtgaaaatggaaaacattacgtgcgtatctcacttgcattagacgataaatggttagaagaagcagctagtagattaatggacctagctgatatgtataaagcaaagcatagttaaaaaattatgaaggaagatgatcaatatatgaccaaaattaaaattatgagtgtaagagatgaagatataccatatattaacgagtgggcgaaacaaaacaatgttgatgttgatttaaccaaagaaatgttaacagagacaacagttgatactgtaaaaggatttgatggtctatcgttatctcaacaacatccaatttcagaagaggtttttgcgaaattgaaacaatatggaattaagcaaattgcacaacgtagtgcaggatttgacacgtatgacttagatttagctactaaatacgacatcattatctcaaatgtaccctcgtattctccaagttcaattgctgaatttgctgttacacaagctatcaatattgtaaggtatcaaaaacgtattcaacataaagtgcgcaattatgattttcgttgggaaccttctatattatcacaatctatccgagatttaactgtggcagtaattggtactggacgcatcggttcgattgtggcagaaatttttggaaaaggttataacagcaaggttgttgcttatgatccatttccaaataccgctttagcaaaatttgttgattataaagatacattagaagcagcaattaaagaagctgatattgttaccgtgcatattccagctacgaaatataatcatcatttgtttaataatgttgttttttcaaactttaaaaaaggtgccgtatttgtgaatgcggcaaggggatcaattgtagatacacaagctttactttctgttatagatagtggtcgaattaaaggggctgcattagatacatatgaatatgaaagaggattattcccaggtgattatcgtggaaaagagatagatgatgtattgttaaagcaacttatcaaaagagaagatattattttaacaccacatattgctttctatacagaagcggccgtcaaaaatctcatagtagatgcacttgatgcaactatggatgttttaactagtggtacgactaaactaagagtaaattaaaataaaaaaagttggagcgttacctccaacttttttattattctttaacatcatagccttgatcttcaatagtatcgtgtaaatcttttgttgaaacgagttcatcattataatctacacgaacttcgtttttatcaaggtctacttcagcagttcttacaccattaattttagctaatgctgattcgattgtatttttacaatggtcacaactcataccatctactttaatgactttattaatcattgattatcacctccgagtacttcataattactatacccatattttacgctttttaaatttttatgaaagtataaagtttaaaattcatttataatttcattcgttttagacgtaatgcattagttacaacgcttacagaacttaatgccatcgctgcaccagcaatccatggagcgagtaagcccattgcagcaataggaataccagcagcattataaccgaacgcccaaaaaagattctgtttgatgtttcgaatggttttatgacttgcgcgaatcgctttaggaactaaggcaatgtctccacctaagatagtaatatcagccgcttcaattgcgacttcagtacctgttcccatggcaataccaatatctgcttgaactaaagcaggtgcatcattaataccatcgccaaccatcgcaatgttctcacctttatcttgaaaatgagcaacatgtttagctttatcttccggaagaacattggcgatcacatgatcaataccaacttcatttgcgatagcttgagctgtagagtggttatcacctgtaatcattaccgtacgtaaattcatgtcttttagttcttgaaccgcaactttggcttcagatttaacagtgtctgctacagcaatataaccacgtaatatctgatcatatgcaatcaacatgacggtttgtcctttttgttcaatttgggtgatttcatctaataaagatgttgtatcaatatgatgatttgacattaatgaccggttgcctatgaataatgtcttattattgattatagctttaataccatgacctggtaatgtttcatagtgctctatatatgttaaagtaagctgttttgttttagcgtacttaacaatcgcggttgctaaaggatgttcagaattattttcagcagaagctacatatcgtaataaagtatcatcacctttaaagtaagtcacttctggtgtaccatgtgtcaacgtacccgttttatcaaataccactgtatcaatttgatgagtacgttctacatattcgccacctttaaacaagataccttcttctgctgcacgtcctgtaccaaccataatagaagttggcgttgcaagtcctaatgcgcatggacaagcaatcactaatacagagatcatggcaacgagtgcatcttcaaattgaccaggatgaacgaaaataatccatatgataaagacgagtacggcaataccaataacaataggtacgaaatagccagaaatcatatctgctaaacgttgaataggtgcctttgaactttgggcttcttcaactactttaataatattagataaagcggtatcttgacctacttttgttgcttgaacggtaatgacaccatttttatttagtgttgcaccaatcacttcattatcaactgttttatctataggcatggattctccagttagcatggattcatctacggttgttgtccctttaatgacttttgcatctactggaattttttctcctggtttaacaagtaatgtgtctccaacttgaacattttgaagcggaaccattgtttctgttccatcatctttaatgagacgtgcttctttggcttgtaaatttaataattgatttaaagcatgtgttgtttgtgattttgcacgtgcttctaaatacttgccaaataaaattaaagtgattaaaacagcactggtttcaaaataaaggtggggctgtgcgtttgagtctaataaccatttactcatttcataaatactatagaaataagctgcactagtaccaagtgctacaagaacatccatattggcaccaccattacgtaaattcttgtatgcgccaacataaaattgccatcctataataaattgaatgggagtggctaagataaattgaaaccaaggattcataaatatttcaggtaacggtacattaaataaatgaacaagcatagttaaaagtaatggaaaagctaatattgctgaaataatgagtttattacgttttctttttaattcttgaactttacgagaagcttgctctttttttgattgtttaggtttagcatcatagccgagatgttgtattcgtccaatgagcgtatcaacatcagtttgacctggataataatcgattgttgcttgttctgtggttagattgactgttgcttgcttaacgcctgttgttttatttaatactttttcgatacgattagaacaagcagcacacgtcatacctataacgtctagttcacttttatctgtttcaacgtcatatcctaatttttgaatcgttttaataaaatcgcttacttcatattgatcgttaggataatcaatggttgctttttcagttgctagattcacttgagcatgaacgccttctattttattcaatcgtttttcaatacgattagaacaagcggcacatgtcataccaatgatattcaaggtgatttgatgattttgagtcatatgttcgacctcctaccaccttcaatatacccccttagggtatattagtcaatgatcttgcttaataaaaaaagaacaatgttactctaaataaaatgagtatattgttctcttattcataatagctattcatattaaaagaaatcagagggtttaaaatggcttaaatctaaatctttaaaattattgaagttaggatgagtgatagatcgtacaagttcaccacttttagcttcattatagtaatggttggcttcattcattaaatcatgatcttgaactgtttttacaagccctaaaatgataagaatggtaatgataccctttagaatacctttcatgttgtaacactcctttttatctttatctctatatgagtcgttgtttagattaattatattataaaaactctatgttaaaatttcatgcatctctagtacggactttgtatcattcaaaagtagtaagtatagtcattttgttttaaaaatcaaagaaatgggaacggttaagtaaataaagaaggagtgaagaggtatggacttattagattttcataaaaaaattaaaggttatacacaagaaaaacaaccaggttctgaaaaagatatggatcctagacctattgctgaaatggaagaatacaaagctggcggtaaactaaaaggaaaagtcgcattaattactggtggtgactccggtattggtcgttcagtagctattttatatgccaaagaaggcgctgatgtcgctattggttattataatgaacatgaagacgctgaagataccgtcaatcgtttaaaagaaatcggcgttaaagcaaaagcatattctcatgatttaaaagatgctgatcaatcaaaaaaacttgttgaaactgttgttaacgattttggtggtctcaatatattagtaaataatggtggcgtgcaatttcctaatgaagactttttagatattaaaccagaacatttcaatgaaacatttaaaacaaatatttttggtatgttcttcttaacacaagctgcagtacctcatttaagtaaaggtgatgcaattgttaatacaacaagtgtaacggcttatcgtggttctggtcaccttattgattactcagcaactaaaggtgctattgtgtcgttcacacgttctattgcaacatcattgatggaaaaaggaattcgtgttaatggtgtagcgccaggtccaatttatactccattaattccatcaacatttgatgaagataaggtagaaaatcaaggtggagatacaccaatgggtcgacgtggtcaacctgctgaacttgcgccagcttatgtattcttagcaagttatgcagatagttcttatattacaggtcaaattatccatgttaatggtggcgattatattacgtcttagtatgtagtacttatgaagataataaagtattctgtctacgtatagcgtagggagaatactttttatatttatagaaagaaaagaggaaaagacaatgactgaaaaagaaaaaatgttagcacacgaatggtatgatgcaaactttgataaggaattaagaatggacagacaaagtgctaaagacttatgctttgaatataatcatacacgacctagtgatatagaaaaacgccaagcgattttaaaagaattacttggctatgaagcgaaacaactttcaatcagcagtccatttgacacagattatggttggaatataaaagttggagaaaacgtgtttatcaatagcaatagttatttgatggatggtggtggcattacgatcggcgataacgtctttataggaccatcatgtggactatatacagcacatcatccactcaattatcaagatcgtaataaaggatgggaattggcaaaacctattcatataggaagtaatatttggtttggtgcgagtgtgacagtgacaccaggtgtttcaattggtgatggctcagttattgcagcaggtagtgttgtaacaaacgatattccaccgaatagtttagctgctggagtgccagcaaaagtgataagaacgattgatcaaaatgaaacgataaatatacctaatcactttgaataatatagtaaccaacctttaagcagtaacacgtatgcttaaaggttgatttttatgtaaaataacaatttgtattgaaattaaatatttattatataatataattaaatgatataattgtagagtgctgaatgtgtgtattactatatgtgcatcattgaaatagttcaattcattttaatgaaacaacttaagagaaataaaagcaacttagaaaggataatgaatatgacacttaagacatgtcttacaaatcaattaagacgtaaattgaattttttatttaagccaatacaaagaaaaaataaatctgcttatacaagtaaagtaatgacttacgctaaatattataaaaaaaataacgttaaggaatatcagatactatatcaagtgagagatggaaaaagtatcacagatagtccatatgcaatatttaaaagtttaattcaacaacctcgttatcgtaaatataaacacatatgggtagtagatcatcacgaaacattgctattttataaagcaaggtttaagtactataaaaatgtagagtttgttattaaagaatcaagagaatatttgaaagcattaacggagagtaagtatttaattaataattctacttttccatcctatttcattaaaaagccaaaacaaatgtatatcaatacatggcatgggacacctttaaaatatatgggattagacattgaaaatagtctttatggttctcaaaatattattaaaaactttttaagcagcgattacttaattagtcctaatcaccatacgacgacgatttttaaacgagcctttagacttgaaaatatttatggtggagaatttttggaaattggatatcctagaatcgatttaactttaaattcaaatcgaaaagacatgattagcgagttgaatcattatcttcatattagtaaagaacaaagtattttattgtattgtccaacttggagaggcgaggatgtcaatgcaccagaggcaactttaaatcatatcgttgaagaagttgaaaaacttaaacatcatctagattatcaagtgttagtcaaagtccatccttatttatataaagacgcgcttaaaataaaacgtttaaaaccttatttaattcctgattattttgataccaatgaaatattagcgatcgtcgatttaatgattacagattattcaagtatcttctttgactatttagtaaccaataaaccgattgtcttctatactccagatttggatgaatatcaatcgtcacgaggtatgtatattgctaatcgtgacctacctggtcctgtcgttcatcatattgaagatgtgattacagcgatcaagcaaaaagtatatgatgatgattcagtaaagaaaaaatatcaatattttaaacgtcaatatacctatctagatgatggaactgttactgaaacacttattaacatactgtttgagggtaaacgtaagcgtcctaaacgtaagatctgtgctaagaaaagagtgttaatttatcctggtggtatgaaaaataatggtattacaacgtctatcattaatttattagaaaatgtcgattatgaaaaatacgacattacattgtttactaataaaagtaaaaatcttgaagttttaaataacttaaatcgtattaataagaacgttagaattattttgagagtacctccattagcagcatcattgaaagaaatgtatagtatcgatttcgtaagacagagaggattaaaaagtacgttagaacatttgatatatccgaagaaagtatacgaaagagaaatgcgaaaagtatttggtcatagccaattcgactatgcgattgattttagtgggtattctatgttttgggctaatttaattttagcaacaaaagtaaaacgtaaattgatttatttacatagtgatattaaagcagatatggaaagaaaagttaacggtgttaaaatacattatcaaaatttaaaaggtgtactctcgctgtatagtcaatttgatcaattagtatgtgtatccgatgcttctaaagatcaaaataaacagaagatcaatgataaatcattgaataagaaatttgttacttccagaaatacgattaatttgaataaaatcaatcaactaaaattagatgactctgaaaaatttgaaaaacaacaccaatccgtactcgtacgcatcaataatagggatataagttcagtaccatttaaggaagacgatttcaaaattgtaactgcaggacgattatcacctgaaaaaggttttgacttacttattgatgcatttagtaaagtacatgtcagtcatccgcatacaaagttatatattatgggggaaggccctatccgtgttcaattagaacaacaaataaaaaggttgaaattagaaaaacatgtctttttattaggccaaaggaagaatccatactatatcatgaaacaagcagacgtcttctgcttaacgtctcattatgaaggacaatcaatggtattacttgaagcattaactttaaaagttcatattatcgcgtcagatattatagcaaaccgctatgtactcggtaatggtaaatatggtactcttgtgagtcatgatattgatgatatcacagtcgcattagaacagtgtattcaaaaacgaccatctcaatatgaagtatttaacgcacaagaatataatcaattagcacttaaagagttttataaactactcaaatagtaaaaaacggttagcatattaataaaagctaaccgtttttctattaaatagtgatgttgttatgtttattataagtcaaataagctgtaataccttcttcaatactatatttaggattgtaacctaatgctttgagcggggtaatgtcagcacaagaatgtttaatatctccaagacgtggagcttcaaattgataaggtatatgataatcaaagccatgttcgaacgattgaaaaacagctttcaaatttgtttgtattcctgtgcctacattatagataaaaccatccgttagagtagtattaagaacaattgatagaacattgattaaatcatcgatataaacaaaatcacgtgtttgttcaccatctccataaaatgtaaaggttgaatgatttaaaaacttagtattcataatagaaatgactcctgaataatcagatgttggattttgtctaggaccgtaaatattaaagaatcttaaacaagtacaaggaatttgatataaatgattataaatcttagtatattgttctccggcatacttttgaatagcatatggagataatggaaatggtttcgattgttctacagatttaggtaaatcgggtagatgaccgtaaatagctgcagaagaagcaaatatgacttttttaatatttggattatatattcgaattgcttctaatatattgacagtagcatctatattaatacgattggataattctggtttttcaatagtttctactacacttaccatagcagctaaatgaatgacaaaatcaaattgttctttttgtattaactgtgtgacaaattcaaaatcggtgatgtctttgatataaatatgttcattgttcacaaaaggtatattctttaaaaagccggaacttaagttgtcaataatatgtacttctgtgtcatgtttcataaaatattctgctacatgggagccaataaaacctgctcccccagtgataagtactttcatataaatacttccttttctagatgtcggttaattatgttgtgattattatactttattttatttaaattataaattatttatataaaaaatgtactgatagggctatattggtatttgaagaaaagtttaaacaaacaattttgtaagcggttgcaaataagggagtaagcatagtaaaatgaagttaatgatagaaaatatcatgattaagaaacaaagggttagagaatgaatttaaatatttaaaaacatatagggggtaatgaagtatggtagtacctttcaaaaatgaacctggtattgatttttctgtacaagaaaatgttgaaagatttcaaaaaacgttagaaaaagtaaaacatagcttaggccaaacgcttcctattgtcattgatggtgaacatatcattaaggatgagacattcgattcaattaatccagcgaatacatctgaattagtagctaaagtgtcaaaagcgacaaaagacgatgtagataacgcatttgaatcttcaaacaaggcttatgacgcatggcgtaaatggtcacacaaagatcgtgctgaattaatgcttcgtgtcgcagcaatcattcgtcgtcgtaaagaagaaatttcagcagtcatggtatatgaagcgggtaaaccttgggatgaagcagttggagatgcggctgaaggtattgattttatagaatattatgctcgttcaatgatggaacttgcagatggtaaaccggtcttagatcgtgaaggtgaacacaatcaatatttctataaaccgattggtacaggtgtaaccattccaccttggaacttcccatttgcaattatggtgggtacaacattagcaccagtggttgcaggtaatacggtgttattgaaacctgctgaagatacagtgcttactgcatataaactgattgaaattttagaagaagcaggcttacctaaaggtgtggtaaactttgtgcctggtgatcctaaagacattggtgattacttagttgattctgtgcatacacattttgtgacattcaccgggtctcgtgcaacaggaacacgcatttacgagcgtagtgcagttgtacaagaaggtcaaactttcttaaaacgtgtgattgctgaaatgggtggtaaagatgcaattgtagtagatgaaggtgtagatacagacttagctgcacactctattgtaacgtcagcgtttggattctccggtcaaaagtgttcagcatgttcacgtgccattgtgcatagcgctgtttatgatgaagtcttagaaaaggcaattgagttaacaaaagatttaacagtaggtaatactgttgataatacatttatgggacctgttattaataaaaaacaattcgataaaattaaaaaatatattgaaattggtagtaaagaaggaaaaattgaaattggtggagaagcggatgattcaacaggttactttatccatccaacaatcatttcaggattaacatcttctgatcaagtgatgcaagaagaaatctttggccctgtagttggcttcaccaaattcgataactttaatgaagccattgatattgcaaatgatacagattatggcttaacaggcgcggtcatcacaaacaatcgtgaacattggattcaagctgtaaatgaatttgatgtaggtaacttatatctaaatcgtggatgtactgcagctgttgtaggttaccacccatttggtggtttcaaaatgtcaggtacagacgctaaaacaggcagtcctgactatttattaaactttttagaacaaaaagtcgtatcagagatgttctaacataacgaagtggtaggtgctgtggaaagtcgaattcgttcgattttccatagctttttttatagtctcaaaaaaataaatacgctaaacaatgtatgagtcatatctaaaatttatgaaaaatgaataaataaataattgtaaaagtaagtgaaaaaggttatcatttaagtgttgagaatgattattaattacaaatagaaagtgtgactggaatgataaatgtaagcactgcatcaaaagataaaaagtatgtagttaaacaaattgatattcaaaataaaaatatgctatatcgtttaggtgcctttggcttaaatgtaggtagtaaaatcagtattaaacaaaagtgcttgttaaatggaccaagtgttgttgaaattaatggccaatgtgtaagcattcgtcaacgtgatgcacgtttaattatgttagaggagtaagcctatgcacgaaagcttctgtatattaggtaatccaaatgtaggaaagacatcattgtttaatgcactaaccggttcgtatgaatacattggaaactggagtggcgttacagttgaaaagaaagttggacaattaaagaaagatattggcaatttaatcgatttaccgggtatttatgatttatcacctatttctaaagatgaaacagttgtcacagactatctgatgacaaatacatttacaggtatgattaacattattgatgccagtcaattaaagagaaaccttcaactgacaatacaattaatggaattaaatgaacctattatcattggattaaacatggtagatgtggcaacgcaaagaggtattaaaattaaatacgaaggtctaatgagaaaactgaaagtacctgtatttcccattgttgctcgtaaaggaaaaggtacggaggaattgctaaatgaattgtcttttttaaatccaaaagaaagacgtaacttcaaaatcagttatggtaaagaaactgaagatgcgattaagcaaatgacttctatcattcaagcacatacagaatatccttcaaaacgtttacgctttatagcaattcagtatttattagacaatccggaaatcgagcgagaactaccttcagtcatttccgaacaaattgaacctattaaagagaagttaagtcaacacttagatgtatcaatacgacaacatattgaaatcattcgaaatcaatacattgatcgtctattagatggcgtcgttgaatatccgaatgaagaacagcaatttttaactgaaaaactcgataaaataataatgaatagatacttaggtattccaatatttctagtcattatgtggctgatttttcaaacgacatttacttggataggaacaccattatcagatcagctagatgctttctttagcggaccactcacagactggttaaaggcaggcatgcattatatacatgttgcgccatttctacaaaatttgattacagatggtattgtagctggagtaggttcagtcttagtatttgtgccacaaattattgtattattcttctttatttcacttttagaagattcaggatatatggcacgaattgcagttttaatggatagaacaatggaatcaataggattaagtggaaaatcatttattcccatgattattggatttggttgtaatgtacccagtattatggcaacacggagtattgaaaatgaaaaagaaaggttaattactattttaattgcacctttcatgtcatgttcggcgcgattgccagtatatgctatttttgtaggagtattttttgaaaagtatcaatctcttgtagtcctaagtttatatgtattaggaattgtagtggcattaattgtaagtacattacttaacaagtttattcttaaaagtgagaattccgtatttattgtggaactacctacatatagagttccatcaattaaaacgttatggagaagtacttgggaaaaagcaaaaggatttgtaaaaaaagcaggaacatttatttttggtggttctgtagtcatttgggcattgagttacatcggtcctcatggagtgaatgtacagattgatgaaagcttcatgcacagtattggagaattctttggacatctcattgctccattaggatttggtagttggcaagcaggcgctacgttaattccaggattcttagctaaagaagtcattgtaagttctatggctatcttgtattcttctagtgaaggtggtttagtcaatgtcattcaacaacagttcacaccgttatctgcatatgcctttatgatttttatattattatatgtgccatgtatttcaactgttgcaacaattcgtaaagaaacaacatcatggaaatggacacttacagcattaatttatccaatttttacagcgtatatattaacatttgcattttatcaaataacaaaattacttatataaggatgatgacaatgactttattaataaacgtaatcatttttgttgctatttttggttacgctgcgtatacattatataaattctttaatcgctctactcaaggaaaatgtggtagttgcgatacagattgtaattgtgatattaatgcatctagccagttaaatgaattaaaattaaatcatataaaaaacaataattaataataaataacccccgtcgaattaagacgggggttatttattaaaacgatataacgatggtttgatcagtaattaatcgttttaatattaactaatttatgaaaaacgtcatccatttctttaggcgtaagtgttgtctcctcatttttttgccactctaaaaaaccacctataattgaaccaaaaacatagaaaactaagcttttaggaatggtttcttcaagtgctatccgatccatattttcataaacatcatttttgataatatctataagaaactgatttctaactttgttgtattcattatcctcttcttgcatgtgttcgattctagacaatgtttcacgatttaatgaattagacaaaacttgaaacggacgattaatacgttccttaatatcaattgcaaagtaatttttcccaatgacttcaagtaaatagacgagtagttcatatttatcataaaagtgtttataaaatgtagtacgatgaataccaacattttcacaaattttatgaactgtaatagaagagaagggttctatttctagtaaagcatataaactactcgttaacgctttcttagtctttatcactcttaaatctttatcattcatgtctttctcccctaacatgtaaactataaaatatttatatagagatacataatatatgattatagaatagaaatatctataaataaatagagaataactaataaattacaatttaataaaagaaatgattttttatgtttagcgttaaataatttataatatagaaaagttttaactaggatgaatagggtatacaaattttaaagaaattaattagaattataaataaaaattaaaaaattatagaaaaatagtattctttatagaatgattcaatgataattctataaaatataaaaatactctatactggaggatggtaaaatatgaaaggtagtaaaagattaaatcaaattaaagaagataataaaaaacaacttaaaaaattatttaagtatgacaaaaataatgctttatcatttagtaaaccagatcgtgaaaaagttcaagataaatttggtgtatatgttatttttgataaaaaaacaccaatatttgtaggtcaaactggaggatattcaacaggttatcaacctattacgaaagacttatttaacaaaatgggacaatataacttaaaatctggtgtaggcacaacaaaatttaaaaaaggcttagctcaacaaaaaggcttgaacgaagacgatattaaatcaatcactgctgaagattatggattaaaattccaatatgtaaatgttaaagatgagccagcatttatcaatatattagaaattttagcattagaatatgctaaagataaaggctatgaattatataacttcaattaagaactattgtattcttaaaataaacttagtattaaacagttataaatcaatgtgtcagaattgattaatggaagcgagaagaggaattcaaatgaattcagtctcgcttcttattttttattacaatacaatagagtaaggaggaagctattatgttctattcaatgctttatcactctccagtaggtaatttagaaatcgttacagacggagaagtagtgacgcaattagaatatttatatcaatacacgcatttacgttttcctacagatcatgaactatatattttaaaaaaagtaaagcgatggcttgatgactatttcttaggaaataatccagagattgattttcctttacaacctcatggtacatcttttcaacaagaagtatgggcttatcttaatacgatcccatatggagagcttactacttacggaaccattgcaaaacatattggtcaagtattaaacaaaccaaaaatgtctgcacaagctgtaggtggagctgtaggaaaaaatccaatttctatcatcattccttgtcatcgcgttgtaggaaaagatggtagtttaacaggatatggtggaacaattgataataaaattaaattgttagaaattgaaaatgtgaatatgagtcaattatatcgaccattatacacaactaaaccataaataaaaggcgcctaagacataatgagttgtcttaggcgtttataatgttttggggagatgggatgacgaattcattttgagtacatcgtcccaccttttttaatatcggattgatatacattattcaggagaatgataatatctaatatcatcttcaatgttttctaaataaaagatatttttatcgttttctacgttttcaatctcatgattaaaagataaatcatcaaaacgtctgaagaacgattcgtattcttttacagatacttcttgacgctcatttaataaagcttgatgtgcttttttatctaagtgttgttcaaaaccttccactactgtggcgctaaagaattctcccactgacccagaaccataactaaataatccaattgtttgactaggagttaaagttctgttttcaagtaatgaaattaaacttaaataaagtgatccagtatatatattacctacataacgattatagtatacagcatcttcataaccagacgttaatcgagattgagtcgtttcatcagtatcattaatgatagaatctaatgcttttttgcccattttagtaaaaggcacatggaaacataatgattcaaaatcggataatgatttatcttcacgacgtgcatactctttccaactttcttggaatgattcaatatatgcatcttttgataatgcacctgcaacaagtggatatttataaccagtcggtctccagaaatcatacacatctgctgtataagcaacagcatcattgtttaattgtaaaatgcgaggctgatgtgaaattaacattgccactgcaccagcaccttgtgtaggttcaccgcctgactcgataccataacgtgctgtatcacttgcaatgaccaatactttttcgttaggacggtttgcaagataatctttagcaagttgaattgcaggtgtagctgcatagcaagcttctttcatttcaaaacaacgtgcaaaaggttggatatttaataaatggtgaatttgaactgctgcggctttagcgttgtcgatagcagattcagtagcaacgataaccattccaatatgttttttatcatcttctgttataatatctttagcagcattggctcccattgatatgatatcttgagatactggacttactgccatttgtgtttgtccaatcccaattaaaaatttgtttggatcaacttgacgagcctctgcaagcttcgccatgtctacatagtatttagggacataaaaattgattttatcgatacctatattcacaggcatgtcatcctttcgaatagtctaattttaacaatacaatactctgtattttaccaaaataaattactaaaatacaattatatctatattacaggcaaggagataaagaatgaaacaaatcgctattgtaagtgctaaaagaacgccaattggcaaatataaagggaaattgagaaattattcagctgttgaactaggtacaacagctttaaaaggagctattgaatcaattgatatcgatccatctcttattgaacaagttattttcggaaatgtcttacaaagtggtataggacaaaactctgcacgacaaattgctattaaatcaggtgttcctgatacaactccagcgatgacgattaatgaagtatgtggttcaggacttaaagcaattattttagggaagcaacttattcaattaggagaagctaaagtcgttgctgttggtggtgttgaaagtatgactaatgcacctaaacttattttaaaagacggagaagaccctgtagaaagttttatgcatgatggattaacggatgctttccattatgttccgatgggtgtcacagcagaaaatatagctgaaaaatatcatgtaacacgtgacatgcaagacgagtttgctaaccattctcatgctaaagctgcaaaagccgttgaagaaggtaaatttgataacgaaattataaaaatgacagacgctgaaggtaatgagatgacttctgatgaaggtataagatcaaatagtagtgttgaaaaattatctactttgaaaacaatatttaaagagaatggaacagtcactggtggtaatgcttcgagtattaatgatggatcatctgcccttattttaatggaagcaacatttgcaaaagaacatggatttgaaattcttggcatagtaggagattacgctgaagtaggttgcgatccacaatacatgggttatgcacctttttatgcagtagaaaaattattagaaaaaacacatcaacacattaatgatattgatattatagaaatgactgaagcatttgcagctcaaagtatacctgttaaggatcatttaaaaattcctgatagcattttaaatatttatggtggtgccattgcattaggacatcctattggtgcaagtggtgcacgtctcgttacaacacttgtgaatgctttagaacaagaacatcaacatacaggtatcgcaacagcttgcattggtggaggactaggcattgctttaatgattgaaaagggagtacattaatatgaaaagtttagataaaaactttcgtcatttatcaagagaagataaattaaaacaattagtagactacggatggttagataaaacgaattatcaaacattattaagcaatccagttattgatgaggaagtggcaaacagtctcatcgaaaatgtcattggccagggtacgttaccagttggattattacctaaaattatcgtagatgaaaaagaatatgtggtacctatgatggttgaagagccgtcagttgttgctgctgcgagttatggagcgaaacttgttaaccaaactggaggatttaaaacgataaaaagtgaacgattgatgattggacaaatcgtatttgatgatgttaaagatacagaagacttaacacaacgcattcaaaaacaagaaaaccaaattaaacgtattgcagatgaagcctatccttctatcatccgtcgtgggggtggctatcgtggtattgacatagatgcgtttcctaatgaacagttattatctcttaaagtatttgttgatactaaagatgcgatgggcgcaaatatgcttaataccattttagaagcagtgacagcctatctaaaaaatgagttaacagatcaagagatattaatgagtatcttatctaatcatgcaacgtcttctgttgtaagggtagaaggtgagattgatatcaatgatttaaatcgcggcgattattctggtgaagaagtagctaagagaatggagcgtgcgtcagtgcttgcacaagtcgatattcatcgggcagcaacacataacaaaggagtcatgaatggaattcatgccgttgttctagctacaggtaacgatacacgaggtgctgaagcaagtgcgcatgcttatgcagcacgtgatggtcagtatagaggcatggccacgtggaaatatgataaagcccgtggacgtattgtgggcacaattgaagtaccgatgactttagccatcgttggcggaggaacgaaagtattaccaatcgcgaaagcttctctagacttactcaacgttgagtctgctagagaattaggacatgtagtggctgcagtaggtttagcacagaacttttcagcttgtagagcccttgtttcagaaggtattcaaaaaggacatatgagtttgcaatataaatcattagcgattgttgtaggcgctaaaggtgaagaaatttcaaaagttgctgagcaacttaaacaagaacctaaagcaaataccgaagcggctaaacgtattttaaaatcaatacgtcaatcttaaaaataagccatgagaatttagaaatggaagagattccatcactaaactttcatggcttattatgttatgtcaattaataaatgtaattgtaattacgcgcagcagatgcactaatataacgcgtactgtaggctagtggacggttataattatattctgaaacaagaatttttccactactgtaaacacgttcaacgatggcaacatgaccgtaatatcctgcagttgattgcataatagcatagcgtttaggcttatgtcctgttctataaccagcacgctgagctctatagtaccaatttttggcattaccccattgatttgaaaccggtttacctaattgaacacgacgttgatatgcccaccaagtacattgatatttattataatagttatagccagctgcttcagaagtatgtgtatgttcaacattttgatatgtataagttccagtaaaaataattgccgtagctaatattaaacgtaaaatgaatgttttaattttcattaagttctcctcaaaaattaaataatttaaagtctaaaataatattattatttaaaaagttgtaatacaatataagaaatgaattatacaaataactgtaatacttctgaaatatatgtaatacattgtaactaaatctttgcataaaaaaagacgccacgagggcgccttagtgagatgatacttccatgtaatgtataactacattttattgaaatcatacatctgtgaattggttaaaaacagctaatgctcttttaacactagtcaccggtatgttatcaagacacggatttgttcgaaaatatagcaatatttcgttttggctcttcacgtctttaggaaaagtgttatcttgattaatccaatttaccaattcacctaatggtgtgtcatcgcctataaaattttgcataaattcgtaaaagctcaattcatcacctcatattcgcttgagccgattttgattataacattttttgtaatttgaaaatatagttttgtttatatgaaaaataatttatttataaatattatttttccataaagtatacatatttgagtcagttctcgaatgaattcaaattgaatgaatttacattttttttacaaaaataatgtataataaaaaaaagaattttttaagaaggtgagcaattggatatcaagcatatgaaatattttatggaagttgtgaatcaaggtggtatgacaaatgcttctaaatctttatatattgctcaaccaactataagtaaagcaataaaagatattgaaaaagaattagacatgcctttattcgatcgacaaaaacgttatttagttcttacagatgcaggaaaagtattttataaaaaatgtgaagaaattttagcattatatgataatattccaaatgaaattaatggcttgcttggtttagaaacaggtcatattaatattgggatgtcagcagtgatggatatgcaacagtttattaatattttggcggagtttcataaattatatccaaacgttacctatagtcttaatgaaagtgggggtaaatcgattgaaaatcgtttgattaacgatcaaatagacattggcattacgaccattcctatagatgagaacacatttgattatgtgtctttatatagtgaagatttaagacttatagtgagtgaagaacatcagttagctaagcgttcatctgtgactatggctgatttgaaaaatgaagattttatattattcaatgaggacttttatcttaatgataaaattatagctgctgcaaaaaatgctggttttatcccaaatacagtgtccaatgtatcacaatggaatttcatcgaatatttagtaatagcacgattaggcgttagtattttaccagaacatattgccaagatgttaaaagatgagattaaaagtataaaaattgaagactcaggtatgagctgggaacttggagcaatttggaaaaaagataaacttttaagttatgcaacttctaaatggataaaatttatgactgagagattggaaaacaagtaaacgattcatttttacaaatagtgaaaaaccttaacgtaggttctctcactatttttttacttttaaaacggttccatagaaaataactataagttatatataaaatcaatatttttataatctatcaatatagattacaattttgaatatagactaaaaaatcgctgtaacaaattcgacaaatttatggaggtcagtcgttttgaaaaaagcattaaatattatagagattattcttcaaatcgtattggtggtagcgattagtattataggttcactgctacaaaaatggctacatataccattagcaggaagtattatcggtatgatattattttatattttattacattttaaaattattcgtgttgaatgggtttctaaaggagccgacttcttattaactacaatggtcttcttctttattccttcagttgtaggaattatggatattgtttctaatatcactacaagttatattattttcttcctcttgattattattggtacaagctgtgtggcacttgtttctggatttattgctgaaacaatgtctaagaaaaaacctcatactaagaaaggaaatcattaaaaatggatatattaaaaggcgttttaatgatattattaactgttgtaatgtataaacttgctcaaatattacaacgtaaatataataacccattattgaatccagcattaatcggttcacttggaataattattgttttacttttaacacgtcaaaactatcacgattacatgattggcggtcaatggattaaccatctattaaatgccactgttgtatgtcttgcttatccactttataaaaataaagataagattgtagaaaatattggggtcattttttcaagcgtcatggctggcgtgatattgaattttgtgttagtgtttagttcgttaaagttattaggttactcagaagaaacaatcgtaactatactacctagatcaatcacagctgctgtaggaattgaagtttctcaagaacttggaggtacagatacgattacagtactgtttatcattactactggattgataggtagtatgatgggttcaatgctacttaaggttggtcaatttaaaacatcaatcgcgagaggtttaacatacggaaatgcatcacatgcttttggaactgcaaaagcgttagaacacgacatcgaatctggcgcatttagctcaattggaatgattttaacagcagttattagttcaattcttattccaattatgattaagttgttttactaaagggaatacagaaataaaatgtatatttaggaaaggggctatttaatcaaatggcgaagattaaagcaaatgaagcattagttaaagcattacaagcttgggatattgatcacttatggggtattccaggtgactcagttgacgcagtagtagataatttaagaacagttagagatactttcaaattttatcatgtacgtcatgaagaagttgcaagcttatcagctgcagcatatacaaagttaacaggtaaaatcggtgtagccttaagtattggtggacctgggattgttcacttattaaatggtatgtatgacgctaaaatggaccgtgtacctcaacttattattacaggtcaaacgaatagtacattattaggtacaaaattcttccaagaaactaacatttctaaaatggttgacgacgtagcagtattccatcaccaagttcaaaaaggtgatgacttatttgaaattacaaatgaagcgattcgtactgcatatgaaaaaaatggtgtagccgttattatttgtccaaatgatctattaactcaaaaaattaaagacactacaaatcgtccagtagatacgtctagaccagtgttaccaacaccatcttatcgtagcattaaaaaagctgctaaattaattaacaaaagtaaaaaaccagttatgcttgttggggtaggtgcaaaaaatgcttcaactgaattacaagacttcattgaagcagctaaaatccctgtaattcatacattaccagctaaaactgttttacctgattcacatccatacagtgtgggtaacttaggtaaaattggtacaaaaacgtcttatcaaactattcaagatgctgatttattaatcatggctggtactaacttcccttatgcaaattacttacctaagaaaaatattaaagcgattcaaatcgacacaaatccaaatgtaattggtgaacgcttcgatattaatgttggtattgttggtgacgttaaattagcattccatcaattaactgaagcaatcaaaccagtacctcatcgttcattcttagacaaaacgttaaaacgtaaagctgtatgggataaatggatggaaaaagacatgaataatacaagtgctccaattcgtccagaacgtttaatgaaaactatcaatgattacagtaaagatgacgctgtatactcaatcgatgttggtacttcaactgtttggggtacacgttacttagacttaaatgttaataataaatttattatctcagcatggttaggtacaatgggttgcggtcttccaggtgcccttgcttctaatattgcttacccaggtcgtcaagcaattgcaattactggtgacggtgcattccaaatggtaatgcaagacttcgcaactgctgttcaatacgatttaccaatgacagtcttcgtattaaataacaaacaattatcattcatcaaatatgaacaacaagctgctggtgaattagaatatgccattgacttctctgatatggatcatgctaaattcgctgaagctgctggtggtaaaggttatgtattaaaagaccctaaccgtattgatgaaattgttgaagcagcattaaatgaaaatgtaccaactgttgttgatgtacatgttgatccaaacgctgcgccattaccaggtcaaatcgttaacgaagaagcatatggttatggtaaatgggcttacagatctatcacagaagataaagaatttgactttgataaagtaccaccaatctctgtagctgctaaacgtttcttataagaaatagattcgacacactgacgaaagtaatgcttttgtcagtgttttttatgaatatttaaattataaaaaatgtaaaatattagtaaaaaagatattgaaaacgctttatattataggtataattaaattgttaaaaaagaactgcgtgttactattcgattaggcatgagcagataagctatcattatttttgtcataaatgatgagcttatttggtcatgcttttttaatgcgtaaaaaagatatattgaaaggattgaatcaaaatgtttaaaaagctatttggacaattgcaacgtattggtaaagcattgatgttacctgtggcaatcttgcctgcagctggattattactagcaattggaacagcttttcaaggtgaagcattacagcaatatcttccatttattaaaaatggagtaattcaaaatattgctaatatgatgacaggtgctggtggtattatttttgataacttacctatcatttttgcactcggtgtagcaataggactagcaggtggagatggtgtagcagccattgcagcttttgtcggatttattattatgaataaaaccatgggagcattcttaaatgttacaccagcacaattggaagacccatctaaaggattcgcaaatgttttaggcatacctacacttcaaactggagtgtttggtgggattattataggtgctttagcagcttggtgttataacaagttttataatatttccttaccatcgtatttagggttctttgcgggtaaacgttttgtgccgattatgatggcaacgacatcgtttattttagctttcccaatggcttggatttggccatccattcaaaatggattaaatgcatttagtacaggtttattagattctaatactggattggcagtattcttatttggatttattaaacgattacttattccatttggtttacatcatattttccatgcgccattctggtttgaatttggttcttggaaaaatgcagctggagaaattattcgaggagatcaacgtatttttattgagcaaatacgtgaaggtgttcatttaacttcaggtaaattcatgcaaggtgaatttcctgttatgatgtttggattaccagcagcagcattagcaatttatcaaacagctaaacctgagaataaaaaggtagttggaggcttgatgttatcagcagctttaacatcattcttaactggtattactgaaccactagaattttcattcttattcgtagcaccattattattctttattcatgcagtacttgatggattatcatttttaacactttatctactacatttacatctaggatatacattctctggaggattcatagattttgttttattaggtattcttccaaataaaacaccatggtggttagtgattccagtaggattagtttacgctgttatttattatgttgtatttagattcttgattgttaaattcaactttaaaacgccaggtcgtgaagataaacaagcctctgtagctaatacatctgcaagtaaattaccttttgatgtgttagatgcaatgggcggtaaagaaaatatcaagcatttagatgcttgtattacgcgtttacgtgttgaagtcaatgataaatctaaagtagacgttgaaggactaaaagcccttggtgcttcaggggtgcttgaagtaggaaataatatgcaagcgatttttggtcctaaatcagatcaaattaaacatgatatggcacgcattatgaatggagatatcacaaaacctagtgaaaccactgtgactgaagatacatcagatgagccagtacagttggaagaggtaaaagaaacggatatctatgcgccaggtacaggtcatataattccattatctgaagtgccagataaagtattctcagaaaaaatgatgggtgacggtattggatttgttcctgaaaaaggcgaaattgtagcaccatttgatggtacagttaaaacgattttcccaacgaaacatgccatcggtttagaatctgatacaggaattgaagtattaattcatattggtatcgatacagtgaaattgaatggtgaaggcttcgaaagtttagtcgatgtcaatgaacctgtcacacaaggtcaaccattaatgaaaattaatttagcatacttaaaagaacatgcgccaagtgtcgttacaccagtgattattacaaatcaaggtgataaaacattaacattcgatgatgttgattcagtagatgctggtaaacgcattatgacaattaagtaataaaacaagcctgggacatcatatgtgtctcaggcgtttttaatgtgttgatagtcgatgactgaattgaaaaggtgtggtctcaagtttttcaattctaatcctctttgccatggcggggcgacgaattcagaaagaattctgtcccccttactttttatttaatatacaacattattcagttatatcattctcaattaataatttgatagctttatgatctgtagcatttctaaataagtcataagcattttcaatgtcacttaatttactataatgtgtcacgagttgttctggttgaatgattttagatttgagagcttccaacaattcttcagtggtattagcagaaactaaacccgttgtaatgttgatatttttaatccataatttttcgatatcaaattgaacgggtaagccgtgaacaccaacattagcaattgttccatcgacgccaatcaacttttgacataaatcaaatgttgctggaataccaactgcttcaatagcaacatcgacgccacgatgattgatatctttgatttgttgaattgcttcattcacatgactagaattaattgtatgagtcgcgccaaattttttggctgtagctaaacgatgatcgtctaaatcaatcataattatttttgaaggtgagtagaattgagcagttaataaagaagctaatccaactggtccagcacctacaatagcaacagtgcttccaggttttacttttccttttaatacgccaatttcataaccagtcggtaaaatatctgaaagcatcacgagtgcttcatcagataaagaagtaggagcatgatataaagaattatctgcaaaaggtactttcacatattctgcttgcgtaccatcaacaagatgtcctaatatccatccaccgccattttcacaatgagcatagataccttttttacagtaataacatttgccacaagatgagatacaagacacaatgactttatcgccgactttgaagttattgacattagaaccaacagattcaacaataccaataccttcgtgacctaatgtggtatattgaggaacttcaggtgtgtcccctttaataatatgtaaatcagtaccacaaattgttgttttgaccattctaataatagcgtcagtactttccgtaacaactggtttttctttatcgacgagcttagctacgccaggtttttcatagatgtaagctttcatgttgattcctccaatataaattgtgaattatttcacaaacattataacattaatttaataagatgtattctattttgaagagaaaatcattgaactcttgttaaacgtatttaacaagaggatttagatgaaaaaataagtgtaacatcgtaaaataaatatgtataagagaactagaccgttaaattaaataagtaggtgaaaatatgactaaaaatattgaaagtatagaacaatttcatcaatttattcaaacgcatcgattagtagtgattcatgttatgcggaatcattgttcagtatgtcatgcggtattgccacaaattgaagatatcgtcaatgattattctaaagtacattttgctgttatcaatcaatctaatgtagaagctattgcgggagaactatctatatttactgttccagtggatttaatatttttggacggaaaagaaatgcatcgacaagcgcgttttatcgatatgcaagattttgagcaccagttaagtttaatgcatgagagtttaaattaagttaagaaagcctaaacacgataaatgaattgttgtgtttaggctttttttactatttatttaagattgattcaatgatagcatcagcacgttgttgatgctctaaaataatatgacttgattgtttgaaacgagtaagttcatcttcttctaatttcagttcaatgacacgatcagcaccattaccgttaatcactgttggcgttccaatataaaggtcatttaatccatattcaccttcaagataacttgacacattcataatcacatttttattaaataaaatagcttctacaatacgtactaaacttaatgatatgccgaagtttgtagtaccttttcgaacgtaaatatcatatcccacttgagtagtttgagaagcgatagattgtttgaacgcggtttggtctactcctttattcaataaatcaagaacaggttcgccggcaatttgagcatgagaccaaacagctacttgagaatcaccatgttcgccaataacaggcgcatagacattttgtggtgccacatcaaacgtgcgacttaagaaaaattcgaagcgggctgtatctaatgaagtgcctgatccaataattttattcttaggaaattgagacacacgttttatgacataactcataatatcgactggattagatggaagtacaaaataaccatcgaaaccatgagcaatgactttttgaatcataggcacaaagatatttacattatcttctaataattttaaacgtgtgtcgcctttatctaattttgcacttgcacaaatgacgacgatatcagcatcactacaatcactatacgaaccaagatgtacatctacaaacttatctccaaaaggtgtagcatggtttaaatcccatacatctgcttttgctttatcttcatcaatatcaataatagctagctcatcgactagtcctttatctacaactgcatgtgcaaacgcagaacctacgaatccactaccaataagcacaattttatttcttttcattcagcataacctactttctaaaataaaataaaaattctgataattgtatttagaatagcacgtatcactatttttttaaatctttaaaagttgaataagcgatttactaaaatataatgactatgaggtatataataatatagagtataggaggttaaaaaatgaaaaaacgattgttaaccgtagcgacatctgcaattcttggaactttagcttacattaaagtaaaagaaaaacgcagttatcaaagctttattactgaaaaatatattcgtatgtctggaatgaaaaaaacatttgaaaatgtgaatgatgctaaaaaagcattagaggaggtcaaactcttaacagctggtaaatatgatgggacagattatgagtttaaacatcgtgcgcatactagaagtattaatggttctgtaacatatattgttaatgataaaagagagcctcatcaagatgttgtgctttacattcatggtggtgcttggttccaagatccattagataatcattttgattttattgatcaacttgcaggagaattggatgcacgagtgattatgcctgtctatcctaaagtacctcatagagactatcgaacaacatttgaattactaaaaaatatttatcaaaaagaaatattagaagttgaaaatccgcaacatatgacgataatgggagattcagcaggcggtcaaatcgctttatcattcgcacaatatcttaaaaaagaaacaccattaccacaaccaggacatattgtgatgctgtctccagttcttgatgcaacatttagcaatcccgaagctaaaaaatatgaaaaaatagatcctatgttaggaattgaaggaagtaaatatttcattcaattatggtctggtgatacgccaatagaagactataaaatatcgccaattaacggagatttagaaggtcttggtcgtatatctatttttataggaacaaaagaaacgctatatccagatgcattaaagctctctaaaatgttaaatgataaagggattgaacatgattttacaccagggtataacttattccatatttatcctattttcccattaccagaacgtcaaaagttctttatacaactgaaaaatataatgggaaaagattaaatactagtttgaacgttagtgttatttttaagagcattaaaataaagaataaaatatctttgatatcacatctgcctaggctgtttttaaaagtaataataaaataatgagtaaaatgagtatcattctaagcatttgaaatacaatgaaaatcgaatgtttaggttgggaaattttatcgaaattcaataaaaaatgtcacttattaatagtctagctctagcagcaagtaacataccaatccgcatgtatatgacgttgattgaatagtaaatcagatactgtaccacttagtcccataataactatggcacctatcatagtaaacagtatttctcttgttcgtttatgagtagtgcccatatgatgtacctctataaacgatattacaatttttatataaatataaaaacagatactaacttgtattattctctagagttagtatctgtttctttatattcagtattaatagtatcgttatgtgaagacaagacatcttcctttttaatttcagtaaagtttgaagtcgagtgtgatgattcgtttttattgattgtctcgtgagaagattgagaacgattgttgatataacgatggtcagtatctaggaccgaatgactcatgtcatttccttgtagactgccaatcaaaataaaaatgagataactagaacaagccaacaaaactaaagcaagataaatgccaactgcaattttaacaggtttagccatagatttatccatttatgtcctcctagagtcatagcaatgtttacttataaactaacatgagagttttaagtaaatgtaaataagaagtaaatatttatcaatttactattaataaatgtaaggcaattaaatttgtcgatattaatttggaataatcaataatttgtctgagaaaatatttatattcttttaatttttttataattttatactatccttaacttaatatttacatttttaaaactgactaaatattaagatgatagcatacccttattaaagtgtttaacgcattcattaagataatattaaatgaaagacaaaatatgtttaaagagagggacttcagtttgattctcattatcatttgtatcgctttgatattatttctaggaattagagagaaaaagcgacatacacaccgtttaaataagattcctctacgaataaatattaatggtattcgtggtaaatcaactattacaagaatgatttatagtattttgcgagaagatcaatatcatgtcattggtaaaacaacaggtactgatgccagaatgttgtattggtttacagagaaagaatatcctgtccttagaaaaccgcaaggcgccaacataggagaacaaagagacattgtgcaaaaagtagttaagcaaaaaggcaatgcgcttgttaatgaatgtatggcagttaatccagattatcaaattgtctttcaagaagatttagtaaaagcgaatattggtgtcattgtcaatgttatggaagaccatatggacgtattagggccgacacttcaagatattgctcaagcatttactgcaacgattccccgaaatggaaaattagtagtcatgaaggatgagtttacagacttttttgctaaagaagctaaaaaacgtaaaactgaacttattgttgtagataaaaatgatatacctgaatcatacttaaggaaatttaattatttagtatttcctgataatgtagccatcgctttaggtgtagctcaagctgtaggagttgaaaaagacgttgcgctgcgcggaatgttaaatgcgcctcccgatcctggagcggttgaaattaaatattttaatgcaaataacacaaaaaatgtatttgttaatgcgtttgctgctaatgagcctcagtctacgaaagcgatattaaataaagtggaatcatacgattatccttatacaaaaaaagtagtgattctgaactgtcgttctgacagggtagatcgaacgcgacagttcgttgaaaattttattgaggacgtcgaattcgataccttaatttgcacaggaaaaagcacgcaaatggttacagatgtaatgcaacgtctacctgaaaagacatacataaatcttgaaaatcatgatttttcagatatagaaaaagcgattcttagtgaatcacagcaggcactcatattttgtgttggaaatattcatggtccaggtggaaaaatagcagaatttatagaagggatagaataaaatgataggttcggagttatacttttccctatttgttggtattgtattaagtttaatttttgcagaaaaatttgggattaatcccgcaggtcttgttgtacctggttatttagcccttatttttgatcaacccattatgttactatctgtgttggtcattagttgtctcacttattttattgttacgtttggtattagtagatgggtcattctttatggtagacgtaaatttgcagcgatgattttaactggtatggttctaaaatttatttttgatttaatttatccactcactccatttgaagttgtagaggtttcaggtatcggagttgttattcctggtattattgccaataccattcaaaaacaaggtgttgtaattacattagctacaacaatgttattaacatgtatgacttatgtcatcttgttcttatatagctttattaattaatcgcgagcgaggagcgcataataatgaaaaaaacaaaacgattatcagcgagcgaatggttacttaagcaatcaaaacgacataaacgaagaaactttttgtatacgtttattgtcttagttatcacagtagtacttctaatttttgctattcgagctgttaaagttgaacctgtagagacgatgccacattcaggtaatagtattagaaatacatatttaggaaatatcactttgaataatgacatcagaaaggtcaatttaaatgatgtttttaaaagtttaagacagccattacaacaaagtgatttttccacagcttctttatatgtgaaccaattttctaaaaatcctaaagaaaatttaaacaaaaacatagaaaacattatgtttttaaaaaaacaaaatattaaaagtatcaatttaattaatagcactatagataatgtacaagcgcaagatttatccaaaaaagttgaagcacaaacagattataattttttaactggaaatggttcgaatccaattaatagtaaaacagtgcaacaaaaagttaaaaataaaaaagtcgctaatgtttcgttcacagatattgaatcgtattatgaagatcctttaaaaaatacgacatctattagcttagatcctaaaatttttgtaccattaattaaaaacttaaaggaaaacaatgatcttgtagttgtgaacgtagattgggggattcctaacgaacgtaatgtaacagatcgccaaaaagcttatgctcatgcattagttgatgcaggtgcagatgtaatcattggccataatacagttatacaaagtattgagaaatataaacatgctagtattttttatagtttaggaaatttaacctctgctgattttctatcaaaaaatcaaaaaagtatagttgttcaacatgattgggatggtcagcatcatcaatttcaaattacacctgttcgctctgcagatggaaaattaacaaaagatcatatgaatagtatggagtcacaacgttattacaataatattaaagataaaacaattcatctgaaagaaaagaatggggggtattcttttgaatattaaacaaaattggttacctattgttacaacactcattattattgctattttattaatggttacatttgctagagcaaatgaaggtctcgataattacgaaaaaaatgaattaaataaagctacggagcaatatttatctaaaggggccaagtagtatgaatatctataataaagtgacactatcagtcattttagtgattacaattttaatctcatttacattttatttttttaataaagaagataaacctgataaagatgatctatatgaaaacaagattgctaaccgtaaatcagcaacctctgatgagcaaaaaacgtatggtgtcgcttcaaacaatgctatcgcaacacgtgtaggtaataaaattattgaagatggtggtaatgcagttgacgcagcggaaggtgtcgcatacgcgcttgcagtaacagaacctcattcatctggattaggtggtggcggcgctacacttacctacgatggtaaaaatggtgaagaacctcgcatgtatgaatataaaacaacatcttcatttaattacaaaaaaggagataaaatagggacacctggttttgtacgcggtttacatgatatgcatgaaaaagaaggtaaaatggatgagaaaaaaatcttaaactatgtcattccattagctgaagatggctttgaagtagattcagagttagaacgtagtttgaaattatttggttctgacattgatcgaaactctcccttctttaaaggcaagcgtacagttcgtgaaggtgcaattgtaaaacaacctgctttagcaaatactttaaagaaaattcgagataaagggccggattatttttataatcatattggaaaaagtttatctaaacaattaaaaaatcaactcactgaagaggattttaaacaagtaaaaacagaagaaaagaaacctattagtacaaaatatttaaacaatactgtttatgctgcatctaacccattaggtgggatcttaatggaacaaggtttgaagattgatgaaagcgtaaattctgcaaatgatcgtacagattatattacagggattgtcaaatctcgtgatattatgtatcgaaatagagatattgttaatggcaaagaatctagtagcaatacctacttgtctcaagattatttattagataagattaacggtatcaattttgacgaacaaggtagtgacttcaatacacaacgtattgataacacaagtacaacgcactttgtagtgattgataagaacggtaagttagcaagtactacaaatacattatcaagcttctttggaacaggtaaatatgttaaagaaggtttttacatgaacaactcactaacaaacttttcaacagatccaaacagtccaaactatggtgagaaacataaagcaccacgttcttatacgtcacctactattattgttggacccgacttctatatgggcattggtacgccaggaggaaataaaattccaacgattcttaatgaagtcattgtagactatttaagaggaaatggtacgttgcaagaatctattaataagccacgtttttataatgatggtggaacaatcttctatgaaaatgctatggatgataacgatgtcaatattttcaaaagtctaggttttggtgtagaagaaaaacgtaacgaccctaactttggtagtgtgcaaggtgccgtttataataagaatgatagaacagtggaaattgggcatgatgtagggaatagataataaaaaaggacaaaaatcaatcggtttttgtccttttttatttactcaaaataagtattgaaataattatttaaaacgctatcataaatacatagatagctaaatttaatttatttacaatagaaaatataaaaataataaattgtcattaatataatgatatgaatagtgatataaagggtgagtcgtatgaaagaagcagtattaggtattgatcttggaacgagcgcagttaaaattattgcggtaaatcaaacaggccatgtgattacttcaacaagtgtgcctttaaatttaatacaatcccaacctggatatagcgaacaagatccagaggaatggtttaatgcagttaaaacaggcatatatcggttaaatcattctgatgaaatgaaatcgtataaagtgaagggcatctcattctcaggtcaaatgcatggactagtagccttagataaagaaggtcaccctgtacgacatgctatcctttggaatgatacacgtaattcagaacaatgtaagcaaattcgatcggtttatggagagcgattaaatggaaatccgattcttgagggttttacacttcctaagatgatgtgggtaagtacacatgagcctgaactatggaagaaagtagatgtgttcgttcttcctaaagattatgtacgttattgtttaacgggtaagattcacatggaatattctgacgctgcaagtacgctccttcttagtccagaaacgcatgattggtcaaaagaagttggagatacatttgatataggagatgtttatccatcacttgtgaaatccacagacgaagttggaatgattcaagaccccttagcgagtgaacttggttttacatctccagtaaaagtatttgctgggggtggagacaatgcctgtggtgctattggtgcaggtataatcaatgataatgatacattatgtagtattggtacttctggtgtaatcgtaaacgtagaaaaaagtaatcaaacgcactataaaaataatatacatttttttgatcatagtgttccaaatacatattatgcaatgggagtaacgttggctgcaggatatagtcttaattggttaaagagaacattttttgataacgatacgtttgatgaaattgttaaacaagcgagtacctcgtcaataggtgcaaatcgtttattatttgcgccttacctagctggtgagcgtacaccacatggcgatgcatttattcgagggagtttcattggtattagcggtaaccattctaaatcagactttgcacgggcggtactagaaggtattaccttttctttatatgattcaattcaattgatgcgagaagcgggaaaagaaattacacatattacttcaattggtggaggggcaaaaagtgaattttggcttcaaatgcaagctgatatttttaatgcatctatacgtaaattgaagcatgaagaaggaccaagtatgggggcagcaatgattgcggcgtacggattacaatggtttgattcttttgatgactgtgtagcacaatttatagacgttgaacatatatatgaaccaaatttgcaacgacaccaacaatatgaatcttattacaatatttataaacaaatctatcaacatacacatcaacttacagaagcattattaaagatttaaagcgtttagcccatgattatttagaaagaaactcgaagaatcagatgacaaagtagggacagacatcgtttttatgtccctacttttttaatagtaaattccgattaacattcctttttataattaaaatattatatttataaaaaatatattgacaaaaatctaatatagatattaaataatatatataaattcctcattccaaataacactatctgttaagtatggaaaggagtgatagttatgaacgatacccatttcattgatcaactatcacacgtaaatatgattgagacgctttatttaaattccaatgatttaaaaccctctatgaatcttttcctaaatttattatttaaacgattattactagaatattatgtatacattcgtacaatttacaataagtatgcatgtttagaaatgccatttctatcctttcaactttttttcaatcattttcatgatttattttatatcatgtatacactcatcgatacgcaaaatataacaacttattctaacgttttagaatagtaaaacgatatagttaagtatgtttgtgtgtataagagatccaccccgttaagaaatagagtgagtaagaaaacaataaataattgataaaattcaatcaagtggtgaacattcatattactaaaagatgaattataactgagtgtatttataaacatctttttcagtagaagtgagtatatttctcatttctactgtttttttatgaataaaattaatattttgcgtctaatttttttacaagaaaattaaattcgttaaaatacttaaaatgtgaattatttcacaaataaattttggatttactatattaggtgttgaaaacgttttctgccaggtgtactatgacattggctaggaaattagagagaaagaggttattgggaaatgaatattattttaggcgttggcactcttgtattagtattaattgtaatgacacttttcttaaactttgcaccatatgggaaacaaggattacaagcactgtcgggagcagcctgtgcgactttcttaccacaagcattcttaagttatgcgataggtgacgttttccatattcacttcttccaagtgattggagatttagcaggaagtttagctggcgttgcagtagggattttgacatgtgttaatttaggtatttccccagtatttgcagttatcgttggtttagtattacatgattttaaattactaccagcatttattgcagcgtatgttatttcatttggtattaaatttattgagaagaaagtaccagaagggttagacttaattacagttattttaattgctccagctgttgcatttggcttagcaacggtaattagcccaggcgtaatggctgtattgcaacaaattggtggcgcaattactgctgtaggagatagtaatccatacgctttagcagtgatacttggattagtaattccagttacaggtatgacaccattaagttcaatggtactgacaagcttattaggtttaacaggtgtaccaatggcaatcggtgcattaacttgtacaggcgcttcatttgttaactacgtgatgtttagtagattaaacattggtggtccatctaaagcatttgcagtttttgttgaaccgctcactcaaattgatttaattgctaaatatccattacaattatatggaacaaatgccttgattggtgtagtaaatgcatgtattgtaacatttagtggactagtaataaatgtaaaaggtatggctacaccaattgctggtgcaattgtattgtttggctttaatacaccaatgaaagcagtaattacaatcattgctgtagcaatttcaagtatcattttggcgttcgttatcagtacattgattaaaaaattcaatcttatggatttatctattaaattaccatctaaacaaaaacaacctaaggagagtgtttaagaatggctactaaaaaaagttatgactatcaaagtgcgtttgatattattgggccagtcatgatgggaccttcaagttctcatacagctggagcagtaaaaatagggaatgctacttttaatgtactaggaggcattaaaccagaaacattagcaattcattattatgaatcattcgcaaaaacacaccaagggcatggtacagatttagcaattgtaggtggtgcaatgggttatagtacgttcgatagtcgaattaaagattcattaactattgctaacgatttaggtattcatgttgatattattgaagaagatggagaaagtattggagaacatccaaactgtgcttatttaattgctgaagcgaatggacgtcatattgaagtaattggtaattctataggtggcggtaccattaaattgagaagaattagtgttgaaggtatagatgttaactttaatcatggcttacctattttagtcatggatggatctaaaaataagtcggaagtgaatcatttcttaaatgatgtaaacgaacttggcgtaagtatagatgaagaattggttgatacagatgatgataatagtttagttgttttaccgttaacaaaagcaatcaaagaatcaacattaaatcaaattaaagaaaaatataatcacttaaacatatcctatataaaataaaggaggattaaaaatgttcgattcaattagagaaactatagattatgctgttgaaaacaatatgtcattcgcggatattatgattcaagaagaaatggaattatcaggtcaatcacgtgatgaagttagagatttaatgaaagaaaatttacaagtcatgcgtgatgctgtagttaaagggaccacaggagatggggtagaaagtgtcacaggttatacgggacatgatgcagctaaaatccgtgattacaacgaaaatcatcatgctttatcaggccatgaaatgatggaagcagtcaaaggcgctgtagcaacaaatgaagtgaatgcggcaatgggtattatttgcgcgacaccgacagctgggtcctccggtacgattccgggcgtattatttaaattagaaaaaacacatggtttaacagaagatcaaatggttgatttcctatttgttgcatcattatttggacgtgtagttgcaaataatgcgagtgttgctggagcaacgggaggttgtcaagcagaagtaggttcagcttcagctatggcagcagcagctgcagtatcggtctttggtggtgaaccagaagcttcgggtcatgcgatggcattagctattagtaacttattaggccttgtgtgtgacccagtggctggacttgttgaaattccatgcgtcatgcgtaatgccattggttcaggaaatgcattgatttcagcagacttagcattagctggtgtgaaaagtagaattccagtcgatgaagtcatcgaagcgatggacaaagtagggcgaaacttaccagcacaacttagagaaactggactaggtggtttagcaggtacaccaacaggagaagccattaaacaaaaaatctttggtaatgcagaagatccagtcaatagtttttcataatatttaaaatcctaaaccattcttgaatgatagcatattcaagaatggttttttatgcctttaattatcagaaaatttcaaaaaataattgcaatatttcacttttaaatatagaataacttaaaaggggatgatgatatgcttagattatatattttatttttaaccttcatcattaatacaacgttaacacgtgtatggacgatcgaaggaacttgggagcatcttttacttcaatcaatgtctatgagtataatgtttgtatttcttttttactatgtgtgttttatgcttgaaaatagaaaacataacaaaatagataaacttagagatgaaaaataaacaaaaaagtcgagacagttatttgaataacagggtctcgatttttttatgaattatgtatccgcttttaaatcgtattgatagaaagctaaatcaagccaacgttcaaatttatagcctacgttttcaatcgtaccagcatgtttaaaattgaatgtttcatgaagtttaatacttgcttcatttaatgtatctatacctgcaactatagtacgatactggcggtgtttagcatcatcaattaaatgttcgagtaaatgtgatgccacgcctcttctacgatagtctttatttacatatatagaatgctcaatagaatataaataggctggccaatgtctaaattgaccatacgtggcaaacccagctactttatgatctatttcaaatacaaatataggttcgtttgcaagcacttttgtttcgaaccatacttctcgttcattaagactttgtggatgataagtatatacagccgttgtattcaatatagcatcattataaatatttaatatatcaggtaaatctttacgttctgcttctctaattatgataagcacctacttatagtatttattattaatttaagcacttgcatgaaattaaatcaaatatatatcatataatctaacattttatttagaaaaataaatggtatactatgaattaagaattttaaaattaaaggagtactacttagtgaagaattggacaaatcgactcatgaccatgattggcgtgattttgatattagtagcagtatatttatttgcgaaaccatatattgataattacttacatcaaaaagataataacgataaagtagaacaatacgataaaaatgataaaagcaatacatcaaaagaaagacctacgattccaaaagataaatcgaaaatggcagggtatatcagtgtacccgatgcggaaatcaaagaacctgtttacccaggtcctgcgacacttgaacaacttaatagaggtgtaagttttgcagaaggtgatgaatcacttgatgatcaaaatatttctattgcaggacatacgtttactgatcgtccacattaccaatttacaaatttaaaagcagcaaaaaaaggcagcaaagtttattttaaagttggagatgaaacacgagaatataaaatgacaagcatccgagatgtaaaccctgaagatgttcaagtattagatgaacatgaaggggaaaccaatcaactgacattaatcacgtgtgataattataatcaacaaacaggcgtttgggaaaaaagaaaaattttcgtagctaaacaaattaaataaatactttagttgaccgttcatcttctcattgatgagcggtttttatgcataaaattttattctttgtatgtaatttctaaatgtgaatatagtttcactcttcaagtactgacttcaatcccaatcataaggtggatataatggacgatgaaaagtattgtaagggggaaaccactcatgattagagccattgcagtagatatggatgggacatttttagatacaaataaagaatatgacaaagtgcgatttgagacaatttatcaagaattaaaacgaaaccatattgaatttattgcagccagtggtaatcaatatgcaaagttaaagtctatttttggagagcgagacatgtatttcatttctgagaatggtgcagtgatttatcatggcaatcaattgtataattactgtagttttgatcaaactatatatgacaaagtagtgaattatattcatcttgatcaacacatcgacgaattcattgtatgtggacttaaaagtgcatatattttaaaagatacgtcagaagcctttaaaaaggatgctcatttttattatcgtcaattagaagaaatagatacatttcaacctttacctaatgatgaatatgtgaagattgcattaaatattaatcgtgagacacatcccaatttggacacagatttagaaacaaagtttaaagaagaaattaaactggtttcaagtggccatgatagtatcgatattattatgcctaatatgacaaaaggccaagcgttaaaacgtttgttaaaaaaatgggacatgtcaccatcagaattaatggcattcggtgatgctaacaatgataaagatatgctagaatttgcagagcatagttatgttatggcaaatagccatgatcaatcattatttgatatcgcaaaatttgtagcgccaagtaacgatgaacaaggggtacttcaaatgatagaagaaaaagtattaaaaagtgagacagaataattcgtcgactcactcagtggtcgactgccaacacataaaaatgcctgggacatcataagttgtcccaggcatttttatatatcaaatcttagtttaattgagtgtcacatttacctgtgttaatgacagataatgcagcatttaatccaccttcaactaagtttctaactgcttcatctgagaagaaagcaatatgaggtgtcactaagatgttttcattttcaattaattcaagtaaagttttatcttcaatttctttacctgtccagtcatatgtgaagtaatcagcttcattttcatatgtgtcaatggcagcaccatataaagtaccatcatttacagcatcaattaaagctggtgtatcaataacagcaccacgagcagcgttgactaatacagcgccttttttcactttgctaaacatgtcagcatcgaataagtggaagctttctttgttagcaggtacatgtaaagaaatgatatcagcatcggcaattgcttcttcaactgaatctttatattctaagaaatctaatgagttgtttggatatgcatcatagcctactacttttgcaccaaaaccagcataaattttaccagttgcagcaccaatacggcctgtaccgataattgcaacagtcatgtttttaacaggtgtagacatgataggtgcagcccatttgaaattatgttcttgaacgcgtttttcaattgcagggaatttacgtactaattgtaaagcgattgatactgagtattcagcaattgtttcaggtgaataacttggtacgttagaaattacaatattgtgtttttttgcaagatctaaatcatacatatcaaaaccagcagtacgttgagcgatttgtttaataccgtatttttcaagtttaggataaacagaatctgctaatttaccgaattgcattgtagttacgccatcgaaaccttctaattgatctactgtgtcttcgcttaaaatatcttcagaagtaacaacttctacattgtgttctttaccccaatttaaagcgtcttttttttcgtaatcacgagttccgaaaaacataatttttgtcattaaaataaccccatttcattttgtataaataagttaaaatttaataaatacgtaagactaaagttgaagtaagagattgggtacaacatcattgaatgttatctctaacacaacttacaaccctattatattgtgaattagttcacaaatcaattaaaaaagggacttttattttgtataatatgaaattatatacataaaatatcatttaaaatgaaatattacaacttgggaataggtgaatccttttgagctaattattttggctaaaataatttgtattttataatttgagtaagtttttaaatagaggagtggatgactatcaatcagattcaaaataccattatagatgcgtttaaatttagatttgctactaaggaattcgatacaacaaaaaagataagtgattctgaattcaataccattcttgaagcaggacgattatctcctagttcgttaggtcttgagccttggagatttcttgtgattcaaaacgaaacgctacgtgagaaattaataccttatagttctggtgcacaaaagcaacttaattctgccagtcattttgtactaattttagcccgtaagaatgtaacaccgacgtctgattatgtacagtcatttattagagggattaagcagtatgaagagagcaccattccaatgtttgaagataaagtacagggattccaaacacgtttccatattaatgataatgctagaaccattttggattgggcgtctaaacaaacctacattgcattaggtaatatgatgacagcagctgcattaatgaatattgattcctgtccaatggaaggtttcgatttagatggcgtaactgagttattagaacatgaagggatcattgatagtaatcagtttgcaccttcagttatggtagcttttggttatagaaaagagaatcctacaaaacctaaaacacgtcaaccacaagaagatgtaattaaatggataaattaagcatagttttgtaaaaaaagggtaaataataagtatacaaaacgtatcaatgaatgaagtaaatttaacattactttatatagagttacgttatgatttataaacaaagaaagagggatgaaaacggatggcaaaagtaaatgttagagattttttagatgaacaatatgatttatttataaatggtgaattccaaccaagtgaaagtggagaaacacttacggtaactaacccagcaaatggtgaagagttagccaaagttgctaaagcaaatgaaaaagatgttgataaagcagtgcaatcagcacatgaggcatttgatagttggagtaaaatttctaaagcagaacgtgcagattatttattagaaattagtcgtcgtattgaagaaaataaggaacatttagcaacagttgaatcacttcaaaatggtaaaccttaccgtgaaacatcaacaattgatgttcctcaagtagctgaacaatttaaatattttgcaggagtattaacgactgatgaaggttcggttaaccaaatagatcataacacgatgagtttagttgtaaatgaacctgtgggagtagtaggtgcagtagtagcatggaacttcccaatcttacttgcatcttggaaattaggtccagcattagcagcgggtaatacagtggtaattcaaccttcttcttctacaccattaagcttaattgaattagctaaaattcttcaagatgtgttacctaaaggtgtagtcaacgtcattactggtaaaggttcagaatcaggtgatgcgattttcaaacatgaaggtgtaaataaattatcattcactggttcaacaagtgtaggttatggtgttgctaaagcaggcgctgaacgtattgtgccaactacgttagaacttggcggtaaaagtgctaatattatctttgatgatgcaaatttagatcaagtcattgaaggcgttcaattaggtattctattcaaccaaggtgaagtatgtagtgccggttcacgtttattagtacaatcatctttatatgataaattattaccaaaattaaaagaagcgttcgaaaatattaaagtgggtgacccattcgctgaagatacaaaaatgggtgcacaaactggcccagaacaaattgaaaaaattgaaagttatattaaattagcagaagaagatgacaaagcaaatattttaacgggtggacatcgtattactgataatggtttagataaaggctacttcttcgaaccaacaatcattgaactttcagataatagtcataaattagctcaagaagagatttttggacctgttattgttgttgaaaaattcgaagatgaagaagaagcaattaacattgctaatgattcagaatatggtttagctggtggtgtcttcactacaaacttacttcgtgcattaaatgttgcaaaagcaattcgtactggacgtatttgggttaatacgtataatcaaatcccagctggtgcaccatttggtggttataaaaaatctggtatcggccgtgaagtttataaagatgcaattaaaaactatcaacaagttaaaaacatctttattgatacaagtaatgaaacaaaaggcttatactaattaaaatatgattaaatagtttaatacatgttttaaaatgtcgacaaaggtatatactttgtcggcatttttttatgaagtatgattaaaaattagaaaagtatgacagatttcattttgaagttgtataagtctctcggtaatcccaatttaacgtatatgcagacgttttgatgaaaatctaaatagtaagatcttcgaactgaaatcaaaatttaatataaattgtattttcaatttaaaaattgatggttaatataatataaatacgtctttatattttaagtttgatgaaatttaaatacattatatattttgaaaagagaaaatgatgaaacgtttaaaatttttagttatttatttagttattacaattatagtaagcggttgttcaaacattgataatgtaaagcatcctaaagaagcctatacacctaaatcattaactgttgagtttgttccatctcaaaatgctcaaatccttaatgctaaagtaaaacctttgcaacaattattatctgatgagctggaagttcctgtaaaagtacatatagcaacaaattataatacaatgatagaagggttgaaatcgaaaaaaatcgatattgcatttatttctcctgtttcttacacattagctcatgatgctcatgcagcagatgtattgttaaagtcaaaaggttacttagtagataataaaggaaatcaaacacatcaccttgtagattactatcgatctcaaattgtggttcgtaaagatagtaatattaatcatttaaaagatttgaaagataagagggtagcgttacaagatgtggaatcaacgtcaggatatatttatcctttagcatcgttaatggaaaaaggaataaaaaagtctgatattcaaattcaacaagtgaaaggtcatgatcaggggttaattgcattattaaatcatgatgtagaagctgttgctacatatcaagatgctcgggcagatttaaaaaaagagtatcccaatatttatcaagaaactaaagtgatttatcgcacaaagaaaattccgaatgataccatttcagtacgtaatgacatgagtagcaaatggaaaaagaaaattagtaaagcatttattgatatcagtcatacaaaaaaaggtaaacatgttattagtgatatttatggtcatcaaggttatgaaaaagcaaaagatagtgactttgatactgtaagaaaatatcgagatattgtagattaaaaaaagattggatgattgtcatccaaccttttttttaatcaggaactacacttacatctccatgaacagtcacactaaacccttcaggtgatgttaaattcgtttctttagcgtgaggttgatagatatcaatatgtgttaatccataagtgttcttattgtctggattcacttgattagattgccatgtattcacagcaatgtgatgatgatagtgttgtgtagaaataaataaactttgagggaggtttgaaatatgttcaaaaccaagtttatcaatatagaattgacgagcctccatcaaattatgtgtttttaaatggagatgtcctagttttccatctgatggaaaaccttgccaacccttttcagtacgatgtgaaattaaatcttgtgcatcaacttcaagggtatccattttaataaagccattctcccattcccaaccactagaagggcgatcttgatagacttcaataccattaccttctggatcattgaaatatagcgcttcacttactaaatggtcaccgccaccaacaggctgatttaaacgactcatatgatataggaagttagctaagtcttgtcgtgaaggtaataaataagcgatatgaaaaaggccagcttctctaaattcaggatgacgtccatgatttaaaagatgaagcgttaacgtgtgaccatgttctccaacattaaaaatggtttgtgtgtcagttttctttttaatagaaaagccgagtacttcagaataaaagtgattcattttgtttaaatctttaacatttaaagtgacgttcgtcacttgcattgcttcttttgaatgaaatgtagtcatgtatcattgcctctcttttttatactaagtatattaaatatactagaatgattaataggaaacaagataaataacttaattaaaaaaatcctctagagaatgattctctagaggattttattttactcttatcctaaataaacatcttggtaactatcatttttttctaatacatcttttgcaaatggacaagaagcgataatttttaagttattttgacgagcatgttctacaactgcatcaactaatttagttcctaaaccttgaccacctaattcatcagatacaccagtgtgatcgatttcaatttcattgttatctacttgtttgtaagtgatttctgctttaggattattttcgtcttcacctacataaaatttattgttaccttgtttaatttcttcagccatattacttcactccttatataatgtcttagtattatttatcacatttccactaaattaaaacattacataaataaaatttagaatataaaaattataaaaaatttaaatacaaagttattgcttttttataaaagaacagatatagttgagaacgaaattattacgttttggaggggtttgtgtgaagaagatgatcgcaattatcggtttgatgtgtttgtgtctcatattatctgcttgtagtacaaaccgcgatatcactcacaaacagaaaaaagtaacaactgagaataaattaaaaatttataccacggtttttgcgtttgaaagctttacaaaacaaattggtggtaaatatgtggatgtagatacgatttatccaccgggtgctgatatgcatacatatgaacctagtcaacgcgatatgattaatattgcaaaaagtgatttatttgtttattcaagtgatcatcttgatccagtagcagctaaaattacaaaatcaatgaataataatgatatgaaattagcggttgcaaatagtttaaataaacaaatccttgtgaatgaagatgatgatcacgatgaacatggacatcatcatgaagcaacatcatatgatcctcatgtttggcttgatccaatactagaccaacaattcgcaaagaaaattaaagatgatttagttcataaagatcctgcgcatcgtagatattatgagcataactataaacaattagttgaagatttaaaacaaattgaccatacattatctaacataacgacgcgtcctaaacgagataaagtaattatttctcatgattcattaggatatttagcgcgacgttaccacttcgaacaagaaggggttagtggtatgaataataaagagccaagtcagaaagacatcttagcgctcattaatcaaataaaagacacacatgaaccgtatattttatatgaacaaaatatttcttcaaaaataaccgatgtgattcgtaaagagacccaaactcaacctgtaaattttaataatttagcagtattgtctcaatcccaatcagaagatcaaacactcacttttcaatccattatgaaaaaaaatattcaagccctcgataaagcattaaacaaataaaaaggagagcaagaaagaatggcgttacatctttcttgctctctttttttatttttaatttaccatctaatataacttacagttgtattgtaatattcttcaaaaccatgaataccatctgcaccaccaaggccagattctctccaacctgcgtgataaccattgactgcttcttctgcctcacagttcgcatacacttctccaaattttaaacgttcagtagctgtcataatttcttttaagttttcagagaaaatataagatgatagacctgcattcgtatcatttgccatatcaataacgtcatcaaagtttgtatacgtagttatagcaagaacaggaccgaaaatttcttctttaaaagcactatcagtcgtttttacatgatctaaaattgtaggagcgtagaagaatccttcacgatctaatttatagccacctaatactaaatctgcgccatgttttactgcttcttgaactttatcatcaatactatctaattgtttttgattaatgattgcaccatagtcagtgttttcatcgtatggatctccaacttgaagcgcattcattttatctttcactttattaataaagtcatcatgtacatcttcatgaacaaagatacgttctggacatgtacatacttggcctgcgttattaatacgtgcagtaacaatataatcaacagctttatctaagtcagcgtgttgtgtgacaagaacaggagcatttccacctagttctaagttgagttttttaatgctgtcagccgcatttttaaatacagctttacctgcgcccatactacccgttaatgaaacaagctgaatatctttatgagttgccaattgtgttccaactgtttcaccagtacctggaacgatttgaataagaccagctggaatagttgaatcacggaaaagttcagcaatttttaatgttaataatgttgtttcttcacttggtttgataacgacagaacaacccgttacaatagctggaatcactttacgcataagcactaaaattggagcattccaaggcacaataccagccgtcacaccgataggtttttttgtcagttgaatggtttcgtttactatactattttgtaatacttcacctttgttactcatacttaaacttgccatataatcaatgaattctattgatttatcaatttcacctttagcttgtactattgttttaccttgttctttaacgtataaatgagcaatgtcatctttatgttgttcaagtaaaggaattaataattttacatgctcagcacgtgtaggagctggtactttttcccattcaagttgagcgtgtttagatttttcaattgcgtcgtttacctcttcttcagtagcgaatgtaatcgtatcgattgtttctcccgtagcaggattaatcacgtccattgtttcgtttgacttactttctacaaattcattattaataaatagttgattcgtcattaacgacacctccatacctattattcccgtaaagtattaaatttaatctataaaaaaagaagattcaaaagaagattaatgttctccctttgaaccttctttttttgaatatttaaaatgtctaacccctttatataaaataggaatgagtagaataaagccaaataaccccataattggaaatactttgccaatgagtgaaataaagccgataaatgtacaaatgaacgtcacgattgtcatgacgataataagtacaaaatattgttttgaaaacggtgttgtgaaacgagaggcgaatgcgtacattaagcctacaatagtattatagataactagaatcataataatagacatgatagttcccaaaataggtgagatatgtcgtgccaataataaggttggaagcgctacggatttaatatcattaaattttgtcattaagcctaaattaatcattaaaagtaaaaatgtaataatgacgccaccgattaatccgccccaaatagaagcacgttggtcatgtaaacgcccccccatgacacttagaaaactgaaggcagcagcaatttgtaaactggcataattaataccatcaaaccaccatccaagtgaaatagatgatttatgctgtgcatattgatttgcactttcaaagtcaagatggccagttgcaagataataaatcgcaataattgtgacgacgataactaagaaaggtgtaacgatacctaatactgcaattaaacgatcaaattttaaaaataatgtaaccaaaattagaccgacgagaataagtgaactaagccaataaggtaaatgaaaactttcttgaattgtagatgccccgcccgcgctcataataatagcgagtgaaaacaaaaataatgttaggacaatatcaaatactcgagcaatcatagggtgcaaataataatgaatggattctgaatgattatgtgattttatgttgtaaccagtatttaagacaaacataccgcctagtgtgatgattaatcctgtaatcataatccctaagacactgaattgaccgttacttgtgaaaaattggaatatttcttgacctgtagcaaaaccagcaccaacgacaacacctacaaaggcaaatgctacgatcatcgactcttttaaaactttcatttttaaaaatcctttctaaatcaaacacatgagaatatattaatctattttaaaggacattttgttaaaaataaatattaaagtttacttgtaatgaacattgtatttctcaaaaatacattagaaagaatttgtataaattttaagttatatggggtatataatagtttatagttcttatataaatgttgtttaaaaaatgtaattaatatactatacattattcagtaaagtttgataggatattgcaatatattcaatttaaataaggaaggtgtagatatgttatttgatttacctgtaatgctagttattgtgttatttcttgcattaggtatcttcagtcaatggttagcaaatcgaattaaatggccttcaattgtagtcatgtcgattgttggtttattagtgggacctatattaggactagcaaatcctgagcaaacactaggttcagagatatttagtccaattgtatctcttgcggtagcaatcatattatttgaagggagtagtaatttagattttagagaattaaaaggtatttctaaggcggttatacgtattattacgataggagccacaattgcatgggcgcttggagctattgctttacataaaattttaggttttcctatttctatcgccattgttatgggaggattacttcttattactggaccaacagtgattcagccactgttaaaacaagcaaaagttagaaacagtgtagataccgtcttacgttgggaaagtattatacttgatccacttggtccaatactagcattagctgcattttatgtgtatcaaatcattggacaaggttttggtttccaattactctttatatttatttttaaaatgttgattgtagcattcattggctttggtgcttcattcttcttcaattggctcatccaacgcgatgtcataccacaaaatttaatgccttccattcagttggtgtttatattgcttgtgtttagcatctgtgaccaaattctcgatgaatctggtttactggcagtaaccatttttggattaatgatggcacgttataaacgacatgatttaatttataaagagtcagatcattttattgaaaatatgtcttccattttagtttcaacggtgtttattttaataacatcatcattaacaccgtctgtattgatggatgtattatcatggaaacttgtgattttctcacttgttatgattgtgttagtacgtcccattgctgttttattatctaccattggtactgaaatcactaaaaaagagcgtgcgcttgtagccatgatggcaccaagagggattgttgtattaactgtagcacaatttttcggtggattatttttaaatgataatataaaaatggcatcttatattacaccggtaacatttggtttagtatttattactgtagtaatatatggttttagctttacaccaataagtaaaatgcttggtttagcaagcactgaacctccaggtgtcattttagtaggtgagagcgaattttcttatcacttaggtagacagttacaatcgcatggtattccagtgatggtgtttaacttgtttagtaacacttctgataaagctgaagaactcggttttgaaatttttaaaggaaatttattatcaagtagtgatcgtatgtatgcagacttaattcgctataacaaatgcttattaatgaccaaatcatttatttttaatagtcttgcatttaatgagttagttccagaatttggattaaataatgtaaatatgatgccagtatcctttacagatgatcaagcacgtaataatttaaatggaccgcttcgtaatcatattttattcgatgaagagcatagtccaagatggtttgacaatgtgattacgaatcaaaatattatcgaagttccagcctcttcatatcatgatattacagataaagatatgattatttatcacattagtgacgataaagaagcgacattccataggagtacaaaatcaatggatgaatatgacaatggaacatatggtattttaagaaacgtatataaataataaaaacgcccggcgacagttcatttgaagtgtcgccgggcattattataggtttattttaaatatctgtcgtgcattaataattttaacatgcgaatttgttccataatgtctttaccgacatttgtatctctaatttttttacgttgtaattcttcatcaacgacacgtcgtactgatagttcatcagcaccatcagataagacattctctttagaatcaaagaattggtgtgctacaagctgcataccaaatgaattgtaaagtaacgtgtaacctgcgatacctgtcgtagattgataagcttttgagaatccaccatcaatgactaacatcttcccattagctttaataggatcctcgccatcgatttcttttactggtgtatgtccattgataatacgaccttcatcaggattaagtccgaaatcttttagcattttgcgaatcatatcaacatcttcacgtaagtaataataagggtttttcggttctttatgagacgctttatcttcaatgaagtagcgctcaaatgtagtcatggcacgtttaccaaataaagaactgtattttcctgtccataaataccatacaagatccgtagataaatcatctgttttctctttgtcgctaaacgctaagcgcacgtgacgttcaaagacatctaataaatcacggcctttatgttttacaccttcaatttcaaaagattccatttcgccattatcatctacaggaatgcaaccatgaataagaagatttccattataagggagatataatttacctttttgcattagaaaggccatatgacgttttaatttttcagattgttggaaagacagtaataatttattaacaacatcttcttcttctggtaataattttgcaggatctttagggtccaccgtactaaagcaagtatcttttaaaggatacgttttaccataaattgtaatttcgtttgtatcataatttattttttctaaaactaaacggtcttccatttcaaaacttgggcgacgtttaataattggcatttcaagcttaaattgaatcattgcaatggcttggtgaatcttagtaatttgtgcttcttcgtgtttagataagcccacttttttatccggacgttttttcggtttgaacgctgggttatcgccatcgtaatgtttttcagctaaagtgaggagtggtcttaaattaataccatatgcatcttcaataatatctaagttatcgtagcgtgcacatatacgtagtaaattggctaaacacactttagaacctgcataagctccaatccaaagtacatcatgattaccccattgaatatcaacagaatggtagtcaattaatgtatccataattttgtcaggttctggaccacgatcgtagatatcacccacaacatgaagatgatcgacgacaagacgttggatggtataagataatccaataattaaatcatctgattgatcaagctcgataacttgatttaagagcgtttcataatacgattttttattattaaattcgttatttttataaagcaactcttcaatgatatatgtatactctgaaggtaaagctttacgtagttttgaacgcgtatattttgaagaacaatatgtgattaaatcaatcaaacgctcgattgtcaggatataccattcatttaactcacgttttgaattaaagtcattcttaatgagctttaatttttcttctggataatacactagtgcagctaaatcatctatttctttttgagatatgttacctgcaaaaatatcgttaattttagcacggacattaccagagccatttcttaatacgtgttggaacgatttatattcaccatgaagatcgctgacgaagtgttcagtaccttttggtaattctaaaacggattctagattaataatttctgttgcaagtttttcaggactatcaaattgctgagatagtaaatccaaatactttttctttaattcactttccgtagattgagacatttgatttcactcctgtataggaaatttattagataataagcagagtaataaaaccgcttacataaattatcgttaaaaagcatcactttttcaatagtgatgcttgaattgttgtaaatttaatttgaaagtaaaattaatgtacttatttagcgttattttttttgaagaatagacgatagagtacataaagaataataatgataagaatcacatacataaaataagaatatgtatggatgccagacattaatacatcgaaactatcgctaagaagacgaccaagtaaaattaaggcaaagttccaaatcgttgtgcctaataaagataacatcgtaaatgttgcaacattcattttattgatacctgctggaatagtgattaatgcacgtaaaacaggaatgaaacgacataatagaactgcccacgcgccataacgtttaaaccagtcgttcgcacgtttcacatcatttcctttaagtttgaaccatttaccatacttatcaacaaatcgataaatactttcctctttaattaaacgacataaataatacaaaataagtaaaccgataaatgaagcaattgttgaaataataaataagactaaaattgaaagacctgatttaactgacattaaacctgcaaatgttaatataatttcagaaggcacaacaggtaagacattttctaataaaataagaatgaaaatggctgcataaccccattgacctataaaatttgtaataatttgttccattataaagttaaaaatcctccgttattaaacattactcgaataaaaaattcatagtaaattcattatataggaatttactatgaattgcttgtgataacataataaggattgtacaactcattttaaggattttaaatattgatgatacaattgttctgcttcattatcatcttcaacgccatagacattcattctaccatctttgaataaggtgatttcataattgccatctttaattagctttgcaaatgaggttgacttcacaatatcacctgggaaatgttcagcatagtcaaaagcagtaggttgatatctaaataggtaggtttttccgcataagctttcaatattctgttgttgtttcgtttctaataattcgtaatgacctttaccacatacgtcacattcatcatcttttaaaatatcgatattcaatgctttataatcaatatgaaatgcatcaagagtaattaacttatgagaaaatccatgaccagataaataacgaatcgcttctgtgacctcatagcttgctacctgtgtaatcacaggcggtaatacgccattaatagcacaactctctgcactggttggaatgtgttttaataaacatttcaaacaaggtcctttgaaatcaatgccgtaaacggtacctttactgcctacagcagcaccatacacccacggaatatggtgtttgtgacaggcttcgttaataagataacgaattttgaaatgatccataccatcaatgacaatatcaggattgacggcttttaaaatgtcctcaatagttgtagagtcaatttcttggtaataagtttgaatgtttacatttgaattaatgtgctcaattttttgcttaactgcgtgaactttagagaccatatggtgagcatcatcttcagtatagagtgcttggcgatgtaaattagataattcaacgatatccatatcgacaatggctaaatgatgcgcacccatacgtgctaaaagctctgcaacgtgacttcctaacgcgcctgcaccaagtattaaaatggttgcattggagagggcattttggccatcctctccaaatgcatgataacgcaattgacggttatagcgttgcattataagaatcctaaaccttcagtagggcttgatgcttgtgcagtatattttactggaatacgtcctgcttcatatgagagacgacctgcatgaatacccaatttcattgcttcagccattttaacagggtcttttgcacctgaaactgcagtgtttaaaagaatagcatcagcgcctaattccatcgcatgacacgcatcttttggtgaaccaataccagcatccacaataacgggaacatttgaatgtttaataatgtaacttaaattaagttggttattaataccacgtccagtaccaattggagaagcaagtggcatgacagcatgaacacctaattcttctaaacgtttcgctaatacgacatcattagaaatgtaaggacatacgatataacctttttctaataacactttacatgcttcatatgtttcaaatggatcagggagcaatgtttcatcatcaccaatcacttcgactttaatcatgtcacatactccagcatgttttgcaatttcagcgatacgaatcgcttcttcagccgttttggcgccagctgtatttggaaaagtaataaagtctttaagattaatatttgctaatggattaggcaagtttttatcatataaattcatacgtcttacggcaaaagtcagcacattcgcttctgctgcttcaatcgcttttgtttgcgtcgcttcatcttcaaattttcctgtacctaataataaacgagatttaatttctaagggtccaattttaaacattttatccgcctccaacaaattctaataattctaattgatcatcttcacgtactgtatgttgattgtagtcttcttgtttaattaaagttttattatgttcgacaatgacacgtttagggtctaattcaagagattcaagtacagaagtaatagattgttctgaatcaaaattgaatgcgtccccattaatgatacacttcatgatttaacctccttgaagcactaaatgattcatatcgatgtggcttaacaccggtgagtatccaattagcgatatcacgaccaataataggtgaaagtaaaataccattacgataatgaccagaaatcacatataaatcttcatcaatacggtccattatcggtatttctccttcagtatatggacgtacaccagaccactgtttaatgactttgccgtgtgcgagttctggtatacgttcatttgcaaagtggtgtaaccaagagataccatcgtctgtattaccaactgaatagttatcaaactcgcttgtggcaccaattaagaaacgatttggatattttggcacgatataacagccattggtcataaatacggtttcttttaaatccaagtggtcattttcaatcagtaagacttcaccttttacaccgactacatctctaggtagtgagtattgagttaataatttagatgtccatgcgcctgctgccacaatgactttcttagcttgtaatgtgccttgtgacgtttcaacatcgtagtacccattttggcgctgaacagattgtacctctgtattgacatatcgcttaatttgacgttgctttaaagatgtaaataaagctttagtgtagtgattggcattaatctgtccatcttgtggaatgtaaatagccatttcacttgatgttactgtgccattcgttaaatgagtcagttcctcatctgaaagaacaatgacactagaatctaaaccacttaaaaattgatactgtttttctaaactttcaacatcttcaggacgattagccactttaattaagcctgaattttgaaactgaatgtcaatacctgtctcagcttctaaatcttgacataattgtggaaagagacttcgtgattcaagagcaagtctaaataaatcagtatcttcagtaaattcattttgagcacctaacattccacctgctttatatgacgcgtgtttacctggtacgtcacgatcgataagtgcaatgtcaaggtgagattgacttaattggcgtgcaatagacatgccaatcacgcccgaacctatgattaaaacatcatgcatctttcaaccactcctttcgcaatagttcaatttgttgtaaagatgcgttcataaaaaaagaaatcgcacaaattcctttaaaaccatgaggtaattgaagaatcgttttttcagtgatacctccaatggcataaatgggaataggaatctctaacacacgctgaatctctgcttttgatcgaggcaattgattaggttttgaaggtgtcttaaaaatgtgaccaaaaaagacataatcaagatcgtgttcataagctgctttaacagattcaattgaatgtgtcgacatactcacttcaatctctggatgcgttgatttatagctaaatgcatcttcatccatttctcgaaaatgaatatgagagaggtgaagttgttcaagtaaatgtacatcactatgaataatgatttttgatttagggaatcctttttctataagtgatgttaaaaatgaagacaaatcacttgatgacatgggagtacgaaacaataaaccatctattccatccgagatatcaagaaaatgttgtacatcatcattggttaaatctttatatttcgttatcgctataaaaatgaacatcactccttattaaacaaaaaaacgctatttccctgcagtagggaaatagcgttttgttcaactttacgatatcctagtcgccactttcctacgccagtacaaactggatcaggttccaggaattataaagttcgttctttactctcagccttaaacaaaggcacttccagtggattgtttattcagttgtgtttaaaataaacatcagcgtttttgcttcaattttattctacaaccttttttaatagagttcaaatacaaaaacaaattagatttgtagcaatatactttttaatcagtaaaacacattttacatagctatgtataaataaaataaaaaatattcaaaaagtaattgtaaacgcttgcaaaacctgttaatattataaaaaatatagcaaaaagcttatgatatggggcttgaaaggcggttaaaaaaagggaacaacaagattgggagttttcattatcaatgtgtaagtagaatcaacacaactttaaagggaagcaggaaaaataattatggtacaaagacaaaagaaaagtaatgttcgttggtatttcgctatcgcattctttattattggggtcattgcatatatggatagatctaatatctcatttattgcacctcaaatgatggaagatcttcacatgacaaagcaacaatttggtttattagcttcattcttctcactaggttatgcattgatgcaagtgccttcaggtatgttagcagagaagtttggtccacgtaagatgatttcaatcgcattattatggtggagtgcatttaccattttaacgggaatgattaaacatcatggtttattatatttagtacgtttcttatttggtatcggagaagcaccaatgtatccatctaatgcagtattcaattcaacttggtttgctaaagatgaaaaagggagagcatcgagtgcgttgttagcaggatcatatttcggtccagtattagcaccagtaattactatcgcaattgttaatgcatttaactggcaagccgtattctacatttttggggcagttggtattgtgattgcagcactttgggcaattattgcaaaagatttacctgagcaacatcgcatggtcaatgatgcagaaaaacagtatatcatgcaacatcgtgatttagtagaaacaactaaatccgtagcaccttggaatcaattttttaaacgcatgagtttctatgccattgcagggcaatatttcgtagttcaatttgttattgctctattcttaatttggttacctacttatttaactgagcaatatcatgtacaatttaaagatatgacaattagtgctttaccatggtttattatgtttattttaattttatctgcgggtgcgatttcagataaaattttgcatagcggtcaaagtcgttttgtagcgagagggttaattgcaattgttggctttatcgtatttgctatctccatcttctttgcagttcatacacaaaacttatatgtgaccatcttttggttatcacttggcttaggtggtatgggtatttcaatgggaatgagttgggcagcagcaaatgacattggacgtaactttgctggtacagtatcgggttggatgaatttatggggaaatattggtgcgttaatcagtccatttttagcaggtgcattagtatcatcacttggctggacaatgacattccaattattaattattccagcggtgattgcagctgtattatggttcttcgttacaccagacaaaccattaattaaagatgaaagtagacatattaaataagatttatacattatccacaaaagtgaaagcctgggacatcatcagttgtctcaggcatttttaatatattgactgtcgatgactgaattgaaaatcaatgttacctctcttcttactactgttttctttttataatatccgggtaaaacgttataattatatttggaaggtgattatatgattattattaatgcgaagcttaaaattaaagaagatgtgcgtaatgactatttagatttaatgaacaaattagttcaaagttcacgtcaagaaccgggtaatacattttatgctcattatgaagatgtagcagaacataacacattcgttgttgttgaaaattataaagaccaagaagcggttcaagcacataaccattcagatcatttcaaagcatttagtgaaaatataggaaaatatgtcgctgaagaacctgtcattgatgtagcagaaacaaaataataactaaacatgccttgtctaagtgatatttgtacttgggcaaggcgtttatcatgttatgataagatggtatgaaataagatggtatgaaaaatgaaaggaaagatagtagtgggacatgtgattgcttcattaataaggtttgataagcctaaaattaatctatggaaaggtatacgccaaggattattaatgattatcccaacattgatagggtatttactaggacattttagttttggtctactcgtagcaaccggaactttggcacatacttatgtatttaaaggttcagcacaatcaatgttaagaacagtcattatttgtacgttatcctttaccatttgtatgatgcttggaacattaactgtcaatcagccagttctgtacggcgtattattattgatcgttactgtcattccattctatgtatttaatgtgttaaaaattgcgggtccttcatccacattctttttagttacattttgcttatccagtaacttacctgacgctccagaacaagcaccgattcgtggcttagcgatttttattggaggaatgttagcgacattagtcgtcattttaactattgtattccaaaaacaaaaagctgaagatcgagcgattacctctgactttcagacgattaataatttaatgcatcactttaatgatgctgaaaaatttaatgatatttcacaagacacagtaacgaaatttaaaaattcagagaaactattgattacatcgactactgcgatgagtgaaaagttaagttctcgctttgaaaagttattgcttcttcatacatcagcccaaggaatttatgccgagttacttgaactaaatgaaaaaaatattcgtcccatccctcaagaactgattgagatgatggatatgattacaagaaatgcctataaattatcttcaaaacgagaaaaatggacgaaaaaagtcgatgtggatgaaccatttgaaagtttgatgcaacacatacttaaaatagacgaaattgcacaattacaaccggaacaaatagaatctgaagcgagtattcgtaagccattatatagtaaacgtatcgttcaaaacttaacactcgattccattattttccgcaatgcattaacgtatgctgttattatgggcgcagctatttttgtatcgttatttttcaatatccaacgttcatattggattccattatccgcccatacagtattattaggattaacgacaattcgtatgttagaccgttcattagcacgtggtcttggaacaattgtagggactttacttctatcagccatactctttttccaacctcatttaattgtcgcagtcattttaatggggctgtctgctatgatgacagaaggatttgtcgcagcaaattatgcttttgcagttatttttattacaacacaagtcatcctgttaaatggtttagcctctggtaatttatccattgatattgcgtatacacgaattgttgacgtattgatcgggattgtgattgcggtcattggtgttttaatcattaatcgaaaaaatgcttcaaccatgttacctactgtgattgcagaagtggtacgtaaagaagcggttattttccaatatttattttcagaaaataaataccaagatacagcacgtgatagaacagaaagtttatcattatctgtaaaaatgaataatatgacacaagtgtacaattcagccaatggtgaattattctcaagtaaagaggccattcgttattattatccaagtatttttgccttagaagaaattagctttatgttaatgcgtgcaatacaagacaaacaacgtcaacgcatttcagaaaaacaaatgggagaatatcttgtcacatttgaaaatgtagcaaaacattttgaattacgcggtagtcttaatgaaaaagaattgacggatttaccacagtataattatttaaaatctgccttaatgaagttacaagataattgtgtagcaacacgtaaagacgttgatcatacaaatcatcagaaaacggtggacgcttaatatcaatgtatgacgtttcattatagcgtatggtggtaaagcttactaaacactatagaggagcgtgacatcatgccttggacaatgaatgattatccacaaacttggaaacatttagatgaattagagcgtaaaaaagcaattgatattgcaaatgcgatgttaaaagatggctacaaagagggagacgctattcctattgcaacaaaacaagcagaagaatggtacaaagatgccagtaaagaagaattagaagaattaaaacataaacatattactcaacatcaaaaagatccatcagcacgacctgaactgaatgatgaagatgttcatgtatattatgaggatcatgaatggaaagttaaaacagaagatgcaaaacaagcgtctgatacgtttagtactaaaaaagaagcaaaacaacgtgccaaagaaattgctgataatcgtggtacacaagtgattgaacatcaaaaagatgaataatgtaatagagtccgagtagcaatgaaacttgctattcggctttttttatgactaaatgactcagactaaatgagtagcgtcaagtctaggttatcatttttagttcacttaagagttagatataatatacagtgatgattaaaggaggcaacaaatatgtacgtagagagaaaaccatcattgtacattgaagagctacgcagtgaattcaaagaaaatattgataagtttaagaatggagatgaagccttcgataagctagtgggtttcgtagagctcgatcatttatattcttctgcattaaaagagattagtacgaagttagatattttagatgacaattttaatcatatttacaaacataatccaattcatcatatggaacgtcgcgtcaaagaaatgacgagtttagttaaaaaattgcaacgtaaaggtttaactatagatgcggaaacagcgaaaaccaatattttagatatcgctggtattcgtgtggtctgtaattatcttgaagatatttatgtgattgagaaattattattaaaacaagaggacgttaaattacttaagcgtaaagattatatacaacacccaaaagaaaatggttatcgcagtcttcatatagtcgtgtcgattccagtctttctagctgatagagtagaggttacaccagtagaaattcaaattcgaactattggtatggatatgtgggcaagtttagagcataaaattcgttataaaaataataccaatacagaggactataaagacaaacttaaagaatgtgcagtagaaatctcagatgtcgaagcaaaaatgcaaaccattcactcagagattcaagataaagataaataatttagtcatatagcgaaacgatagaaatgtatagctattgtttcgcttttttatataaaataaaatgatatatttttatgataaaataaattaatagtaatatatattttttggagttttaaaatgattaaacagaattttaagtcacaacgatatgaactaaaacaatttaagggtgaacacattgaagtcgcatttgccggaaatatggatgcagataaaaccatcgtatttatacatggagcaatgatgacatatcgcattatgttgttgtttgagccttattttagagagaacaaccttatttttgttaactgtccaagtagaggaagaagctctaacattgtaagagaacaacatacattagatgattattctgagcgtatcaatgatgtactttcacaagttatcgaaacatacggtattaaaaacttagtgatcataggttattctatgggaggaatgataggcacacgtttattaaaatttaatacgttacctatttcacatctggtttatttaaatagcgctgcacgtattacaccaaatcaaagtatgttgtcacgcttatttacttcaaatagtaaaagagatcattttaaagatgagatgattgcctttaaaaatttaccgcagtatattttgaaaaaatcttttcataacaaaaataatagtattcgtaacttattttcatatattgcacccattaaaacgattattacagatatcatttattctacaaacgcagattaccttccagatatagaggaaatagagcaatttcctaaacttttatttatttcaggagaagatgacgaaatcattccttacactgattcacaagaaacaatgaaaatgtataaaaaatatggcggtgaagtaaatgaagttatatattctggtatcggacatatcgactttcctgctgtcttggataatttgcctaatggaaccataggtattattgaccacattaaacagtggattcaagaagaataagacgaccggcagactgcataagcaaatgttaaaatcatacttgcttatgacgtagcgtcattagctatgttaacagtaggaggtgaatgatatgtcacactatacgattggagaattggcaaaacagagtaaagtcacgattcgaacactacaatattacgatcgaagaggattacttatagctcatcgacaaactgactctaatcgcagatattatactgacgaacatgtaaagcagcttgaactgattttagtattaaaacaattaggatgtacgttagatgaaataaagacattacttgatgaagatacaaatatgaacacacttaagacactactttcattgagaaaagatgcattacactcaaaagtagaggtgtacagtcatacattaaatcaaattgaaaaagtcgacacatacatttctgagcaatcaagtgcgtctattaaccatcttactgacatagatgacgctatgaaacaagaatataaaataacatactttagaaaaaagatttggataagtgctggaatcttagggattatacactatagtggtttactattaagtctattaggacgttcaactaagccgttgatcgttatatttcccatcttaatcacatatgccattgtgctgacagcaatatatttaaaaaaagtgttatatctatgtctgaattgccagcatacatttaaacctacattaggtgccttcgtgaaagcgaaacatacacctaaaacaagacaactaaaatgtcccaactgccatcaaacacattattgtatcgaagtatatcaaaacgaatcgtaataaacacctggattataatgagctaggtgttttaaattacaaaaagtaagcgcttgcaaaaatagagtgagtgtattactatacttgtatacaagttaacgtattgaggtgaaaagatggaacaacattatccgaaacaatggaaaaacagaatgactacaggggaaagtatcgctgcggaacttaggtttcagattgttaatagtacacttgaacccgatactttactaactgaaaatcaagtggctaaacaattcgatgtcagtcgctctccggttagagatgcatttaaattactgcaaacgaatcaactcattcacctcgagcgcatgggtgcaagggttcttgaatttggtgaacaagaaaagaaagaattatatgatttacgattaatgcttgaatcctttgcattttcaaaattaaagcatattgatagaaaaaaagtgattaaagaaatgaaaaaacatttagaaatgatgaaagtcgctattcaatttgaagatgctgaatcatttacgcaacacgatcttcaattgcatgaagcattgattcacgcctctcgacatcattatcttcaaacattttggaaccatttgaaacccattgtagaagtacttgtattatgttcaatgagagagcgaatgagaacaaataaagaagattttgacagaatacaccgtaatcattcggtatttatagaagcgatagaacgttatgatactgatacgttaagagaagcgtttcatttaaactttgatgatgtaggtaaagatattgaaagcttttggttacaataaatagaaggaagaaggaatacatatgaaatacatgattggagtagatattggaacaacaagtacgaagtcagtactttatgatgaacatggtcaatttattacaaaacatcatattggctatcctttacatacaccaaacgttgatgtttcagaagaaaatcctgacgaattattcgatgccgtattaatgacagtcaaacatgtgattcgcgaatctggggtgcgcaaagaagatattaaactcatttcttttagtgcgcaaatgcatagcttaattgcactagatagtcaacacgagcgcttaactgaaagtataatttgggcggataaccgtgcgaatcaatatgctgacttgataaatgaacaatatgggggacatgacatttataaacgcacaggtacacccattcatcctatgtcaccactctctaaaatcttttggatgaaacatgagcaaccagatatttatcaaaatactgcaatgtttgcggatattaaaacgtatattttctatcaactttatggagaatacgtgatggatcactctatggcttcagcgacaggcttgtttaacttacaacagttagactgggatcaagaagcacttgaattactcggtatttcagcctctcaattgcctcaacttgtaccgacgacacacattttaaaagggatgaaaaaacgttatgccacattgatgggtatcgatgaaaatacaccggttgtggttggtgcaagtgatggggtgttatcaaatttaggcgttaatagttataaaaaaggtgaagttgcagtcacaattgggacatcaggtgcgattcgtacagtcattgataaacctcgtacagattataaaggccgcattttctgttatgtcttagatgaagagcattatgtgattggtggaccggtcaacaatgggggtgtcattcttcgatggttacgagatgaattactcgccagtgaagttgaaacagcaaaacgcctgggagtggatccttacgatgtacttactaaaatagcgagtcgtgttaagccaggggcagatggcttaattttccatccgtatcttgcgggagagcgtgcacccttatggaatgcgaatgcacggggttcattctttggcttaacattgtcacatcaaaaagagcacatgatacgcgctgcacttgaaggggtgttgtacaacctttataccgtctatttagcacttgttgaagtaatgaatgaaacacctaatacgattaaagcaacaggtggctttgcgaaaagtgaagtatggcgtcaaatgatggcagatatttttgatactgatgtcatcgtaccagaaagttatgaaagctcttgtctaggtgcgtgtgtccttggtttaaaagcattgggagacattgaagattattcgatgatcgaaaatatggttggtacgactcatgcacatcaacctaaccaagatacagtaaatatatatcaacaacttgtaacgatattcataaacttaagccgtacacttgaagatcgctatgacgaaattgcagattttcaacgtaaacatattaattaatccacatatttaaatcaattatacatcaaaggggagaagacaaatgggaacaatatggacactagcaagtgttgtcattggaatcgtattactactgacactgattattttcttaaaactaaatacatttatttcattaattattacatcgattgtcacggccatcttattaggtatgcctttaaataaagtaatggaaacgatagaggcaggtatgggcggcaccctaggtcatattgcactcatctttggattaggagcaatacttggcaaattacttgcagatggtggaggcgccaaccgtattgcggatacactgattgataaatttggacaaaaacacgttcaatgggcgatgctgattgcagctttcatcgttggtattgcattattctttgaagtaggactcgtattactcattccacttgtttttaccattgctaaacgtgcgaaagtgtcaccactgaaattaggattacctatggtaacagcattatctgtgacacatggtttcttaccaccacatcctggtcctgtggtcatagcaaaagaattaaaagcgaatattggacatgtgttactatatgggattattattgctattccagtgacgctcattgcaggtccgatttttaatatagttgcacaaaaacttatcccatctgcttatacacgtgaaggggatatttcagcacttggttcacaaaaagaatttaaagaatctgaaatgccaagttttggtttaagtatcctcactgctgtattacctgttattttaatgttattatcaacggttgttcaattagtgactggacatgaaaatgctgaaaatctgtttgaacaaatcatttactttatcggtacagcaggtacagcgatgttaatttcagtcatctttgctatctttacaatgggcttacatagaggaagaaaaatggatgacattatgaaatctgtaacgaatgctatttacccaatcggtatgatgattttaattattggtggcggcggtacatttaaacaagtcctcattgatggcggtgtaggggatacgattgctaagttattcgaaggttcaaccctgtcacctatcttactagcatggattgtcgctgcagtattacgtatcgcactaggttcagcaacagtcgcagcgatttcaacaacaggtatcgtcttaccattattacaacattcagatgtaaatgtggcacttgtcgtacttgccattggtgcagggagcgtgatcttatcacacgttaacgatgctgggttctggatgtttaaagaatatttcggattgaccgttaaagaaaccttcttaacttggtcattacttgaaaccatcatttcagtatcgggcatcatcttcatcttattcattagtttgtttgtataacttataaaagaagtgagagagaaatcaatgaatttcaatcttacttcttatttttttatagcatggaagaatacagtcaatcgctatgaatgacaataaaagaatgataaacttacttataatataaaagacagaatgcgcaaaggagatattcgagtttgaaacagataaagaaagccatcatacctgcggctggtttagggacacgttttttaccagcgacaaaagccatgcctaaggaaatgcttcctattttagataagccaacgattcaatatattgttgaagaagcggcacgtgcgggcattgaagatattattattgtgactggtaaacataaacgtgcgattgaagatcacttcgataatcaaaaagaattagaaatggtccttgaagaaaaaggtaaaacagacttattagaaaaagtacattattctacagatttagcgaatatcttctatgtacgccagaaagaacaaaaaggattaggacatgccatttatactgcacgtcaattcattggtaacgaaccgtttgcagtattattaggtgatgatatcgtggaatctgaagagccagcgattaaacaattaatgaatgtatatgaagaaacaggacattctgttattggggtgcaagaagtgcctgaacatgtgactcaccgttatggcattattgatccattagagaaacaaggtcgccgctatgaggtgaaacaatttgttgaaaagcctgaacaagggacagcaccttctaatttagcgattatgggacgttacattttaacgccagaaatttttgattatttaaaaacacaaaaagaaggcgccggtaatgagattcaattaaccgacgcgattgaacgtatgaatagtgatgttccagtgtatgcatatgattttgatggtaatcgttatgatgttggagaaaaattaggattcgttaaaacgacaatagaatatgcgttaaaagatcctagaatgaaagatgaactcgtcacatttattaaacatttaggattataataattaaagtgcctaagacattgaagaacaagtggtgattcttcaatattcttagacacttcaatctcatcaaaactaaacctaaaaacaggacacaccttattttccgctaaggcgtgccctggattagagaagagataaattgtcgacaaacacttctctaaccataaatcctcaacatctcagaaattttttctgagaatcttttcctcagcgtcttaggacttctcctaagacatttttattatataatataaaatttgaatatcatagatgttgcaatagcaatatttcgactaataatagcactttttgggaaaaataaggttgtttggattacttaaaagaaaagtgaaaaatatttattataaaatttttaatataatagattattagagaaataggtgattggatgtttgagtataaaactaaagaacaagttcataatagagcaaaggaagcagtaggaaaaacaattagagaattaaataatgatgctccagtgttaggatataaaagttcggtaggtgatgcctttgaagcttggtttggaaaaacaaaagatagtgaaagtcgtccagatatggaagaagctggcgtagagttaaaagcaactccttttaaaaaattaaaaaacggtaattatagtgcaaaagaaagattagttttaaatattataaattatgaaaaggtagctaaagaatcatttgaagatagttcattcctttataaaaatggaacaatagaactagctttttatgaatatattaaagatgttgctagagatgattggaaaataaaagaagcagttctatatgagatgaaaaaaaatccagtagattatgaaattataaaaaaagattggaatattatacatgattatataactcaaggtagagcacatgaattaagtgaaggtcttactgattacttagctccgtgtacaaagggagctaattctaagtcagttcgtaagcaaccttattctgatattcttgcgaaacaaagagctttttcattaaaatctggatatatgacttctatattaagaaggtatattttaggagaagaaaaaattgattcaatagttaaagataaatttgaagtgaaaaataaaaacattgaagatattgtttatgaaacatttaaaccttattataattggacaattgatgctttatgtaaatactttaacattgaaagaaaaagtaaaaaccttaattacagaatagcttcagcaattcttaacttaaaaggaaaagtaaaaaaaaatgaaaaattcccaagagtagaagagtttgaaaaagcttctattgtcgtaaaaacagttcaatttaatgaaaacaatataaataaggagagtatgtcattccctacttttaaatttagtgatttagtcaaagaaaaatgggaagatactaatggaaatcctcaagcgacttggcatgattttttactagaaacgaagtttttattctttgtagtaaaaattgaaaatggtgttgaggtttttaaaggtattaagttttttactatgcctgaagaagatattgaaggacctattaaaaaagtgtgggaagatactgtagaaaaattaaaaaagggtgttactcttactgctagatataaaaaagacggatctctttatagaatagaaaataactttattaacaattcagatgatatgatttgtcatgttcgacctcaccaatcaaaatcggattacagagaaaatgggcaatgtgcagattatctaccttctccagctaaatggataaatagacctgaagataagataaaatattcaagtcaatggatgacaaaacaatgtttctggataaataatacgtatataaaaaaacaagttgacgatttattgtagaaagttatgttaaaataatattgtttattttgtatttagagcgaacgatcgttcgctttttatgttataatttaattaatactgttaaaggaggtgctctcatgaatgaaattaaagtagctgagctttttgcaggagtgggtggatttagattaggtttggaaaatacaaatgaaaaaatgtttaatgttacttgggcaaatcaatgggaaccttctaaaaagatacaacatgcctttgattgttataatagtaatttttcaactggagtacatatcaatgaagatatcgctttaataagtgatgaagaaatggcaaaaacaagagccgatatgattgtaggaggctttccttgtcaagattattcagtagcgagaagtttaagtggagagcttggtatacaaggtaaaaagggtgttttattttggcaaattattagatttattcaaaacacttaccctaagtatattttactagaaaatgtagaccgcttattaaaatcaccgtcaagtcaaagaggaagagattttggtgtcatgttatcaacattaaatgaacttggctataatgtagaatggagagtaattaatgcagctgactacggaaatgctcaaagaagaagaagagtttttatttttggctacaaacaagatttagattatgctaatttaatagataaacattcacttgaagaaataatatataaatatggaatgtttgcagaagcttttccgatacaaagtgaaccaaacaaaaatagaattaattctattgccatatcaaaggatattgtagaaatatcagatgaatttagttttcagttttataatagtggcatcatgaaaaatggtaacatcttaacaattgacactattcctaaatatgaaaaatcaataacgttaggtgaaatagtcttaaatgaagtagatgataattatactttatcggaagaaaaaattgagaaatttaaatacttgagaggtcccaaaaaaataaaaagaacttctaaagatggtcatgaatactatttttcagaaggtggaatgtcagaattcgatgctttggacttacctgctagaaccatgttaactagtgaagcgtcagttaatagaagctctcattttttaaaaattaatgaaacatatagaactctaactcctatagaagcagaaaggttaaatggttttcctgataattggacagatacaatgccagatcgcatgagatacttttgtatgggaaatgctctagtagttcctattgttacaaggattggtaatcaaattgaaaaaatagaaaaactgactaaagataaatttagtcaattaaaacttttttaaaacaacactatttttagtgttgttttttgtttattaccactaatttaagtgtaatttaataatataattgtaaactacatataaagttggtgtatataatggataaaagtaatatagactatgatttaaaaaaagaaatagaaataggcaaatttttagataaatatttttataaaaatttaaatagtattttgaataattgtgaaattaaagatattaaaagaacccatgattctaaaaaacaacatcgtggaatagatttaactattgaatatagtcatggaaaaaagttaatattgatgagaaagcggcagcaacatattttaataaagggctaccaaccttcgcattagaaatatttttttataataagaataatgaattaaaagagggatggctatttggagataaatatgattcaacagatagttacttatttatatggggagaaaacactggaaaagagatttttgcagataacatcactaaacttgaattaggctctataaaaaaatctgttttaagacaagatattgaaaaaagatttaacattaataaagagaattattataatatttgtttagataagatgaatagtatattaaaagattctaaaaataaagatagtaaagaatatgttaaagataagaaaaatgaggcttactggaaaattggtaatgttaaagagagaccctttctaatgatttataaaaaaaatatgttaaaagaaatatgtcaaagttggtttgtagtaacaaaagaagaagtaaaacaaattaaatagaagacctagatatctcattctatatctccgacattcctgagggaacaggataaggagcaaattgcacgcatttttctattccctaacatacttatcatttaaattcaacttacatgtgaaaaaatgaacaaacaaattttcaaattattgaactatttgtgaaaactatcacataccccttttaaaataaaaaaaagcgtgtatgataagaattgtaaggaataagtaattggagtgatactaatgagaaaagtaatagaaggcgttatcttttctgaagaaggcagctacgatatttatttaaaaacaggcgtaaaccaaggattaattagtgatataaaagatggatatatgacaattgattcaatgtcttatttagacgcagaacgtttatatttctatggtctcgaacgtaaaacactagttacaaattaaaatacaaaattgaatgacctcctataacattcaagaacgtatcttatcatgccctcgttggtgagcagtcgagggcatatcctaaatatacccccaatcatttttagataatgtgttgaaacccgcatctcacttcccttgatgcgggtttatttttatgataaagatttaaaattgttcttcacttcattatattggtactcttgattatacaatttgaacttgtagccatcttcactagaaaaaggcattcgaacatttggaatgtgatccattcgtgcaataaattctctttcttggcgtgtacgttctttgacactcatgtgtaaccattcttctttagtaaataaatcttcgaaacgaaatgaaaaacttgtgcgacctactttttgacgtaatgcttgaactaatggactaaaatctttcgcaatcacagacatcttctattcccctttatttaaaataatatatatcttcactttattacgtttaattttaaattacaatctatatttaagactttaaattgataacgacgtttatgtataaagaattatggaaatggaatgaataaataacaataaaggatgatgaatatggctaaattaacagatacagttgcgataattacaggtgcgagtagtggaattggtgaagcaacgaccaaacgacttgctgaagaaggtgctaaagttgtgctagctggtcgtaatgatgagaagttacaacgtgttgcagaacatttgaatgaaggagactatcttattacgccaaccaatgtgatgtatcgtgatgatgtggatgctcttgtagaaaatgcgattgctaaatttggaaaaattgatatctttgtcaattgtgcaggcattaacttatcttctaaaatcacagattacaaagtagacgattgggataaaatggttgatacgaatattaaaggattgttatatggtctgaatgctgtacttcctcattttgaagaacaatctagtggtcatattgtcaatatggcatctatttcaggctttgaagttaataagacgagtgcattatacagtgcaacgaaatctgctgtattacgtattgtagaagctttagaaaaagagcttgcgcgaacgggtattaaatcaaccagtattttaccaggaatggtagatacacctatgacagaaggatatgactttggtgatagaaagaaattagatcctgagaatatagctgatgcggtaatctatgcagtgacgcaacctgcacatgtaaacgttaatgaagtcgtcgttcgtccagtttaaatctaatgagaataagagcgtttcttgcctatggtaggaaacgctcctttttacccttcaatattagtgttgaaatgttacacttatattgaaagatcatataacttaaaagggtgataaagtgatgaaacaacgtttatttgaattgttagatgtattagttaaatataatacggagagtcctcctggacgtaatacggatcctttacaagatgacattgaacaattattaaaaacactaaattttgatattcaacgtgaacatttatatgaaaatgatagtgttatcgtcgcaacattaaaaggggaagatgaggatgcacctaaattaattctcaatggtcatgtagatgtggcgaatgtggacgatgattctaattggcaatacccaccgtttcaactgactgaaaaagagggatggctatatggtcgtggtgtgagtgatatgaaaggcggtatggcctcgctgttttatgtgcttgaaaagttacatcaagaaggacgacgacctaaaggagatattgtcgtgcaatctgtagtaggagaagaagtgggtgaagcgggaacgaaacgcgcatgtgaaattggtcctcaagcagatttggcattagtattagatacaagtgaaaatatggcacttggacaaggcggagtcattacaggatggattacggttaaaagtaagaataccattcatgatggcgcacgtagtcaaacgattcatgcaggtggaggtttatttggtgcgagtgcaattgaaaaaatgaccaaaatcattcaagcactgaatgaacttgaacagcactgggcagtgatgaaatatagtcctggtatgccacccggtgcgaatacgattaatccagcagtgattgaagggggacgccatcctgcttttattgctgatgaatgtcgtttatggattacggttcattatttaccgaatgaaagttatgaagacgttacaaaagagatagaagcgtatttaaatcgtgttgcagatgcagacatttggttgagagagaacccgttacagttcgaatggggcggtgaatcaatgatagaagataaaggagaaattttcccaagttttacgattccattagaacatccaggctttaaacaattacaagatgcacattatcacgttcatcacagtgaaatgaaacatggtatgagtaccacagtgacagatggaggttggactgctcattttgatattccaacaattttatatggtccaggtagtttagaagaagctcatagtgtagatgaaaagatagaagcacaagaacttcaaacttatagtgatgtgttatatacattcttaaaacactggtatgaccatcctgagaaataaattaaaaagccaagtcgtgctgatgaatgacacgacttggctattttatagtcacattatttttttaatgtgtttcgaagacgattgacccagctagctcttcttttagaaacgacgggcattcctgaaggctgggttgcctccttttttagctttttaccatacttaactgcttctttcatcaagtaagcttgtgaatttaatggagataaatcattttgaacgtaatgatactcaccatactgatcttgataacgtcctttttgattatcagataattgtaaattcataaagtctacaagacgtttaccgatttctttatcttctacagggaataagatttcaacacgtttaatcatgttacgtgtcatgacgtctgcagatgataaataaatacgttcgtcaccattattgtagaagtaataaatacgagagtgttctaatagacgacctacaatacttacaacttcaatattttcgctgacacctggaatgcctggttttaggcaacagataccacgaataataagttgaatggtaacacccgcttgagatgcttcaaataatttttcaatgatggccttatcagttaaggaattcattttcatcataattttaccgttaccatgttgacgatgacttgcaatttctttatcaatacgatcaataaagacgtcacgaatatcaaatggtgcgacaattaatttattatattcaggtttaactgagtaaccacttaaatagttaaagaaattaatggcatcttcagcaattaatgtatctgtcgtaatcacacccatatctgtgtatagttttgcagttttatcgttatagttacctgtacctaagtgtacgaatgaagttaatttgccaccgatgcgtttaacgactagagcaattttactatgcgtttttaaatgagtcataccataaataacatgacaacctgcatcttctaacatacgtgcccaatgaacgttattttcttcgtcgaaacgcgcttttaattctacaaggacagtcacttgtttaccattttcagccgcttcttttaagcttttaataatgggtgaatctttacttacacgataaagcgtttgtttaatcgcaatcgtgttaggatcttcagctgcttcacgaataaagtctacaataggctcaaatgattcgtatgggtgatggaaaaagacatcacgttttaatgcaagatcatacacattattgttacctaatgaacgtggaatttgtggtgtatatttatcatatgttaagtattttaatttatgggatagatgatcaactaagccaaagataaatgttaaatctaaaggtccattaagtaagtaaacgtcttgttcatctacttctaacgtttctgttagccaacctaaatcttcgatagaagctgtacgattgtcgacttctaagcgtacagcagaaccacttttacgttcttttaagaaacgttcgatttcgataagtaagtcttcagcaccatcttcatgaatcgttaaatcagcatttctagtaattctaaatgtaaaggtatttaatacttcatagcctgtaaataagtgattgatgaagtgtgtaatgacatcttctaccatgactacatattgttttgaaccttcattataagttaagaatctagggataagagatggaatttgaacaatagctgagttaatggcatcatctgtatcgatatctacgaagatatttagacttttattatttagttttgggaaagggtgatatgcatctataccaagtggtgttaacgttggtaaaatcgtgagtttaaaatccctttctaacttacttaaaatagagtcagataaattttctggtttacacatcacaatgtcataattgcgtaattcttcgataagttcgttatagcgttcatattgcatattgacatattttttagctttttcttgaatagcatctacttgttcttgtggtgtcatttgtgttttattttcaggtttatcaaattccatttttacttggtcttttaaaccagccacacgcaccataaagaattcatctaagttcgaactaaagatagatacgaaatttaatttttctaatagtggattgttgttatcataagcttcttgtaatacacgatagttgaaatctaaccaactgagttcgcgattattatagtacttcggcaagctaatatcatagtctcccaattgagtttgcatattcaaaatacacctcgtcatttcttcgattatcaatctttctatttataaacatatatagtctatgacagaactatctactcataatatagcatacaaattttaagattttgtaaagacaatggatactgaccctttaagaatcttttcaatatgctttttctgtcttaatgcttgatatttctcagcaatcggttcgccttcagtataatgtacgatcagttcataatcgtcattgccttttttcgtttcttttaaactcacgtcttgaacaaagctagtttgtgaaatatttaaagcattcacaaatttaataatgccacctaatgcttgaatggtttcaatttccttattactaaaccaatctgtttctttacaatagaacttaagtaaagatttatttttaaaacttgctaaaagggcgagtttaacgcgatctttatgtgtatagccattaatcattgagttcgcgataatataatacgtatgtggagaacttgaatctgaatcaataaatctacctaaataataaatataggttgcttcttcaaatagacgttgctctgtgtcattaatctttaaatcacctaaattcattaattgttttaataaagattgtgctaattttaaacgaccttgtgagctatgttcttcgatatgatagtcatgtgctaagaaataaatcgcttctttacgcacattatgtttgtcaaatacatctggatagcgtgagcgaatttgtttaataatatagccttcacgtaagccatttcttgaaaatgtgaattgcttagcatctatttttttataaagtgtcttaaatactgatactgcaggaagaataatatctgcacgatcgcgacttaatccatctaggttatttaattcatcacgtgaacttttacgtatcatgttgtacacttcatcaatatctttatctgacattgtataattgtgtacgccacttatagggtaagtgtgttcagattgatgaatacgtgctacgttacgtgcagaaccaccaacgccgactaaggcaatctcttgatctttaagccaatccaatgtactaaattgttgagataaaaatttctccatatctttgatcgcacctttatcattgtggtctttgccatcaaagaatttatgttttaacgtgactaccccgaaaggaaaactatgtgattcaaatagttctttatccttaaataaagtaacttccgttgaaccgccaccgatgtctacagatacgccattttcaatttcagtggtatgagtaatagcatagtaaccataatatgcttcttctttttcaggaataattgagatttcaatatcaagttcatctttcactcttttaacaatgtcatccttattctcagattgacgaatcgctgctgttgcgataggatgtaatgcttttactttaaatttttcagatacagatttaaaactgcgtaatgcttcaatgagtacgttaatgccttcttggctcattttattttcttttgtcaagtattgactcaagcgagcaggcgttttaatgttgagcaattcatttaatcccgcatctttgctaaatctaaagataactaatctaatcgtatttgagccaatatctattaatcctatacgttcttccatcatggcctcctaagtctttcaatacttcctattatagttttattttacatgaattttataaatagaaaaagatacgaatcctatttgcatttctttgaatataaaaaagaattcaattgtaaaacgatttcatttttagtataacgtttaatctaaactgtttagtggaacaataaggttgtattagaaaacaagttcactaggagtgtgacaagatgaaacgtttagaagataaaattgcagtcatcacaggtgcaagtacaggtattggacaagcatcagcaaaagtgttagctaaagaaggggcacatgtcttagcacttgatatttcagatgaattagaaaaaactgtagatgatattaatcaagaaggcggtaaagcgacagcttataaagttgatatctctcaagatcaacaagtgaaagattttgctgagaaagttaaacaagactatggtcacattgacattatcttcaacaatgcaggtgtagataatggggcaggacgtattcatgaatatccagttgaagtatttgataaaattatgtctgttgatatgagagggacgttcttagtaacgaaattcttattaccattaatgttggataatggtggttcaatcattaatacagcttcattctcaggacaagcagcagacttgtatcgttctggttataatgccgctaaaggtggcgtcattaatttcactaaatcgattgcgattgaatatggacgtgaaaatattcgtgcgaacgcgattgcaccaggtaccattgaaacaccacttgtagatcatttagctggtacatctgaagatgaagcgggtaaaacattccgcgataatcagaaatgggtcactccacttggtcgtttaggacaacctgaagaagtaggcaaattggttgctttcctagcatcagatgatagttcatttattacaggtgaaacgattcgtattgatggtggtgtgatggcatacacttggcctggtgaaatgttaagtgaagataaatggaaacattctgtagaataaatcataatagatatattagtgtttaaatgtgggagatggcttcaatgtgaagctgtctcttgctttttatgtatttagataaattaccatattttataaaaatgttataatgttgatgtcgtctttcctttagacggtcgtacgtttaaagggggtgaagttatgacgttaatatttgtactcgttatcgcacctatattaaataggtggctcaatatattgtttgattattggtttgaacaatataagaataaaaaagacggcagataatccaatacacaaagaacccctagtctagggcaatagactaggggttcgtatcgttatgacgttaatactcgttaatgtgatattaacataagtagatgtaatatttcaatattcaaattaccatttgatttgattgtacgtttggtcatttaaagaacgtacaatttcagtgattaatcgtactgaattttcataatcatccgtatggagaacagatacatttgagtgcatatagcgtaatgctacaccaatggcaattgttggaataccatcgttagcaacatggatactaccagcatctgtaccaccgcgtggtgttgtatcccattgaacagtaatataatgtttttttgccacttctttaatatgttgacgtaagccttgatgtgccacatttgaagcatccattaaaataattactggaccgtcaccaatggctgtatcactaccatattgtgccattccaggtgtatcgtatgcgacagcaacgtcgactgcgatagctaaatcggggttaattttatttgctgcgactttagcgccacgtaaaccaacttcttcttgtacagtgccacctgcatataaattaataccaattgattcatctttaagattgttaagtacgtcaatagccagtgcacaaccgtatcgattatcaaatgctttggcagttaaatatttaccatttgcaagttgttcaaactcactataaggtgtaatcatatttccaatttcaataccgtattgttcagcatctgctttacttctaacaccaatatcaataaacatgtctttgatatcgatagactttttgcgtgcgtctggttcgagtacatgtggaggtttagaaccaataatacctcgtatttctttaccatcgtcagtagtgatggttactttttgagataacatcacttggctccaccaaccgccaataggttggaatttaataaacccattattgtcaattttagtgacgatgaatccaatttcatctaaatgaccagctaacattaatgatttagatcccgttttactttcctttttaccaaagataccacccaaaccatcttcgataatctcatcactaatcggtgttaaatagtctcgcattttttctttaacttggtattcataaccagcgataccattaacatctgttaatgtttttagtaattcgatagattctttcatacaatgagtcctcctaaaatgttgttaagtgtattgtagcatggataaaatgaattttatgaaaaatagtttatcatatctatgtaaattaaatgtatcctattcatagttagtaagtgatataatttgtgtaaaattaaatatggggaagtcgatgagtatgatgaaaaaagttttaacattatttgtgttgttagtgttaagtgtgagtatattaggggcttgtactcaatcacgttcaaaaacatacgaaggtgatattgagggtaagcatgttcttacaacattaacttataaaaataataaggtgattaaacaatcaactgtcagtattttaaaatatgatgacctcggaatgtctaaacaagaaggtaaaacatcttttaaagattatcgtccattaaaagggaaaaagggcgtcacatatacgctaagtagtaagcatcaaaaaatagttgaaaatatagatattgattataacaaagcaaatttaaaagacgttagtcgttactttgcattagcacattattctaaaaactataaaaaagtaacaatggacggtacggtcaaagaacttaaaaaaattggattccagaaaaaaagcaatatgaatgaagaataatataaaagtgagacaaccattggcttagatggattgtctcacttttttgttgactattgaataagttttaatttataacttgcgatatcttcaatatgtccattttttcttttaatcacaatatgatcttctgtaatttcgtttgggcttttaacacctactgcagccgcaacattaaataatccttcatgtaaactcgtcacatagtttgtgacacgatattgcttttcttcaacaattaaagctttttcttttttaggatcagttgttgcgacgccaactgggcaagtatttaaatgacattgttgactcataatgcaaccaatgctaatcatcatacctcttgcaatattacataaatcagcaccaagtccaagtgcaatggctactttatcaggtgtaataagttttccagatgcgaatatcttcatatatttgcgtgcatcataacgttctaaaacaccagtaacgattggaagggcagtaaaaagtgggagaccaacaccatcttgtaattcttggaatgttgcgccagttccaccttcaccaccatcaacagtaataaagtttggataaatagctaggttaatcatttcttgaacaagggcttcaacttcatcaactctgcttacaacaattttaaagcctacaggtttctgaccgagcttttgcaacttagctacaaattctaataattctttcggattattaatgaaatcgaaacggttaggcgagttgacggtctgatagggttcaatatgacgaattttagcaatttcttctgtaactttattgccctccatatgaccaccacgtgtcttagcaccttgtgcaagcttaatttcaaatgctttaacttctttatagtttgccacatttaagaaagcttcttcactaaaaccaccgtctttatctctcacgccgaataaacctggtccaatttgataaataatatcgcagccacctttaagatgatattcagataatccaccttcccctgtattcatccatgtgccagcacgtgcaagtccttgagataatgcagtgatcgcgcgaccacctaatgagccataactcataccagattggcctactaaacgtttaattttaaagggatgtgctaattcttcgcctataataactgcatgatcatctgataaataataaggatcgatgtgtttgttctcacgatgctcttcacgcttaaacaatcgttcattatcgattgaataaataaatgttgaaatcattgaatggttatcaatttgaagttctgatttttgtaatggaaacatagcgtttcgaatataaaagccttcttcatagattttttctgtaccaaaactagtcattcttgaatgatatttacttgctaaaacgatatcagtatattgatttcttgaaaatggttttccttcggtatcatttgcaaataaatattgacgtaattctggtcctattttctctaaaaagtaacgtactctgcctaatacaggaaagttacgtaacacactatgttgttcttgtcttttatctttgaataaaagaaataatccaaccattaatatagaaagtaacaccatcataataagaatattaactataaattgcatgacagtaagtaatgttgtcatgcccatccccctcaattccctttatactgtaaatcttacatcaaaaaattttatttacaaataaaaataaatagatttaatatttatctttaaatatcaaataagggaaaagttagaatcccttatgacaataatgtgtttaaatgataaagtactatatgcgtagatagttgaggtgatatatgaaaaaagaaaaagatgtgattacacaagtggtatcaaaaaatcgatggagtagtcctaaaataataaaaaaggattttctactcattcctttatttatctttttccaaattttaacgcctattattattgtttttggcgtattaggtgtaacggctatggttacccaacaaccaccgccatcttatttatataatgtgatgctaagtttaagttttgtgattgctcaatttattgtgttaggattatttttcacattacataagttttatattgcgaatgttgtacgacgacaatatcgtattgcgattcatcagtatttgaaatttatgatcatcatcgtaatggttagtgtgatgttatattatggttttaatgcattggcacacatattaccgcatccttttggctatgtagacacacaagcacaacgtcgtttagaaggattgtttattcatccaagtgcgctgatattcacttttatttcagtagtattattacgccccttaattgatgagttactatttcgtcatctgttgattcatgaattaggtaaaaaatttaatcttttagtaatgatgattgttagtgtgttaatagaaactattgttcaagtatatgatttaatttcaatattggaagccatcccttacatgattatttcaataggtgcagtgatggtatatatgaaaagtgggaaaaatttagtagcctcctatctttatcatagtactgtacaattcatcatatttattattacaatgattgataagcttgtttaaatagaaagaataggagagttatatgacttcggaacataatgatacatattaccaaacctcagaacagcgaccgataagaaatgaatttgattcaaaacgtattgttaaacgtgatttttggctcatacctacatacttagtcatgaatattgtttttccattgattcttacatttattgtgatggcaatgatttcaggcatcacaggtggtcatatatcggaaagtaaatttacaaaatattatttaggatacgcgcaagtctttacgttaattggtcaatgtcttgtattattagtcttttatttaatgcatcgcaaaaccattattcctattgccatctcacgttttaaagctttaaaaaaacatattccactcattattattgtgatggtggccctttatgtattacaaggtgtatatggttatttagtagaatttttaccgaaacaatatcagtttgatgatacagaaaataacaaaatgattattaaaatgtttgaaatcaattggctttggcctgttttatttttagatattgtgattattacacctgttgtagaagaattattattcagacatttgttaattcatgagttaggtaaaaaattaacgtatggtgtgatgtatgtcgtgtcagtactcggatttgcaggattacatatgacaagtgcatcatcaccatttgaagttggtccttatataattatggctacaggatttgttgtggcatatcacttaagtggtcgaaatttagcgatgacaattacccttcatatgataaataactttgtttcttttatagcgattatgatgagtatcatttggggttaagggtaagaggtagagtcattgaaattcaaaaaatagtaacattgaatttcattactttgcctctttttttgttatgataaaaaagaatatgtcatcccattaaagagtaaagataaggaggaagtgcttgtgttattagaagtaaaacatctgacctacaaagccgatcaacgaacgatactcaataatattaattttaaattagatcaaggtgaaaccgttgcagtggttggtccttctggaagcggaaaaagtacattcttaaagcaactcaacaatttaattagtccgactgaaggagaattattatttaaaggaaaaccatatgatgagtacagtcctgaagaattacgttctaaaattagttacatgatgcaacaaagtgaattatttggaacgacagtagaagataatatggctttcccagcattaacgcatcatgatcaatttgatgaagataaagcgaatgatttacttaataaagtcggcttgtcaaactatagtctagattcaaaagtagaacatatgtctggtggagaacgtcaacgtattgctattgcacgccagttaatgtatcaaccagaaatattacttctagatgaatcaacgagtgcacttgatacgcaaaataaagaaaaaattgaagatattatctttaaattagcagatgaaggcgtcgctatattatggattacgcatagtaatgatcaaagtatgagaaacttccaaagaagaattactattaaagatggtcagattacaaatgaggaggtgttaagtcataatgagtaatacagcactttgtttaacagcattattattattaattcctattattatttcatataaagaaggcttacatattatcaaagatttagtcgtcgcttcgattagagcggtggttcaattattaattttaggattgatattagaatatatttttaaaattgatcaagtatggatattattgattgcagtattagtcattattattaacgcttcttggaatacaattcatcgtgcatcgcctgttatgcatcatgtgttttggatttcttttgtttctatatttatatcaacagcaattccattagcatgtacagtgcttgctggtgccatcgattttaaagcaaatgatgtcattcctatcggtggtatgcttgcaaataatggtttaattgccattaatttggcatatcaaaatttagatcgtgcgttcgttcgagatgtagatgatattgaatctaagttaacattagcagcaacgccaaagcttgcatctaaaggggcgattcgtgaaagtattcgtttggcgattgttccaacaatcgattctgtaaaaacatatgggttagtgtctattccgggtatgatgacaggattaattattggaggtatggcaccattacaagccatcaaattccaattacttgttgtatttattcatactactgcaacgattatgtctgcattgattgcaacgtatttaagttatggtcaattctttaatgcacgtcatcaactcgtagcacgtacaacgaatataaaagacaataactaaatctcaatgacacattttttcgcacaaaagtttaagaaattattatataatgaaacagttacgaatgataaaggttaccattgcgtaactgtttttttataccaaaatatagaaagaaaggagttctatgcatgtctgtcatgcgagtggcaaccttcattattagtgtgtttatcgtcggtatggttgagatgatggttgcaggaattatgaatttaatgagtggagatctcggtgtctctgaagcgattattggtcagcttgtgactttatatgcattaaccttcgctatttgtggacccatacttgttaagcttacgaatcgctttgcagtacgaccggtcttattatggacactcgttgcatttattatcggaaatgccatgattgcgatggcgcctaactttattattttagtgattggacgtatcttatcttcagcagcagcgtcactcattattgttaaagtcttagctttaacagcgatgttaacgatacctaaaaatagagggaaaatgattggtgtcgtttatactggatttagtggggctaacgtatttggcgtcccaatcggtacgatgattggggatgcaataggttggagatttacgttcttatttattattattgtgagtgtgatagccggtgtactgatgatggtgtatttaccatcaacatcagaattaaatcaagttcaacgtcaatggggttcaacttcaaataaacagctaaatacatctaaaattttaagaccagcggaggtagtcaaatatttaacgattacttttttaattttagtagcaaattctgtgacatttgtatatattaatcctcttattttgaatcatggtcatcaaatgggatttgtgtcattggcgttattagtgaatgggattgcaggggtgattggtacgtcgttaggtggcatattagcagataaacttagcagtaaacgttggctaatcattgacttttctatttttatagttatgatgttgataatgaatcttattttgcatactgttaccctattattaattggattgtttatatggaatattgtacagtggagtaccaatccagcaattcaaagtggtatgattgaacatgttgaaggtgatacgagtcaagtgatgagttggaatatgtcgagtctgaatgcgggaataggatttggaggcattattggaggactcgttgtttcaaatatctctgttcaagcagtcacgattgtgagcgcgatggttggagctatgggtcttattattgtcttaagtttaaaaaatatgtcttatatgagaaattaaggaggaagtggaacagaattcattttgaattcattgttccgcttctttttatttatatatataacaataaggtgtttgaggagaataagatggccacggcatagtgtggtatgtcgcaaaatagattaaatcatctatcatgtgtttactgagatgacgttcatgttctaatgagttcacaccatgcgcttttaaaatctctaattttccaaaccaaaacactaaatctaaaatatgataagcagattgaaacggtgatgcattagaaaggcaccaatcaaaacgtaatttccaacaatggggattgttgtcaagttgatttaaaaatgaaattgcaggtgtttcgaaataatgagttgtcaccatacgggcttggtctttaccagtttgagcttgggaaatgtgaaggtgtatatcatttaatttcatgacttccacaaagcgctcagatgatagttttctagattcattacgaatatagatattgccttcttctttcgtagtacctataacaaccggtttagtaaattgagaaagaggacgagacatgtttgactcttgaataggtgcataaatcaattcaagaccttttgattttccgcgtgatgcttcatcataagccattaatgataatatatctaaagttgttaagtgagtcattctttttttaggaaaataagcatctttcagataggcaaaatgggctgctttcttttgtcctaataaatgagaatcaagacgtagcgttccacttaataacatcacttgatgatagtatttatctaattctggtcgttgcattaatgccataatactcatactgccagcagactgtcccattaatgttatattgtttgaatctccaccgaaatagttaataaacgtatgtacccatttgagtgcattaatttgatcagacaaaccattgtttttattataatcgctattgaagtaagaccagtctaaaaaccctaaagcacctaaacgataattaaacgtaatgacaatgacatcatattgtgcaactatatgttctggtgtataaagttcctgagaaccatgtccgttcacaaagccaccaccataaaaatagataatgacaggcttatttttatattgattattttgacaccaaatatttaaatataaacagtcttcactttgattaaataattgagcatgtgatgagaagaaggtttcgagtttgttatgtggttgtggtggtatagatttaaatgatgttgcttcaatgatcttttcccaagtttttaagcatttcgagtgtttaaatcgatgttcattgatgggttgattagcataaggaatcccgagaaagtaattaattttccctttagtatagcctttaatatctccgccatgtgttttaattaaagtcaacagtatcatctccatacttatcttatatctaatataacattaaaaaaaacgtctgaagcaagatgagactattctctaacttgtttcagacgtttgaatgattattcgttacctttagcagctgcttcagcttcttctggtgagccatctttcatttttttattgattttcttagcacgtttgaagtaaatactattgaagtgacttgaagaaccaattttataaaaaatgagggacaacacaataatagcaataaagtcatatgggtagtgaatccagttcatacctttaaattctttactacctataaatgacatagcagctaataaaataagatagacaataatccataagctaccgccaatttgctttttagtatttttccaattcattttatattcatagaagaagtaaattggtaaacctaaaataataattaaaataacttctgctgtagtaggccacattgcccaataaatggccagtgatgctaatacgaatgataaaggtgccatgatttttaataatttaccacggaagggacgatgcaatttaggtcccattttacgtaacgcaataacggtagtaggacctgtaagataggctactaatgttgcagttgaaataacagctgcaagtaccccccaatcgcggaataacgttaccatgataatactcatgacagcattaaatgcaatcgcaacacgtggaatattatattttgaattaatttttcctaagaatttaggaatatgaccatttttttccatagcgcttaatacgcgaccagtaatggctacaaatgacacaccagtaccaaatggagatactacggcttcaatataaagtaaaatggctaaccaattaatacttaataaaattgccatgtctgcaaatggtgaattaaagttaataccgtgccaaccatgtgaatgaatcattgattgtggcattgaagtgataaatgtactttgtaagataatatataaaattgcacttaatgttagtgaaatgccgataccacgtgcaatgtttttctcaggatttttaatttctgagcccatattaatgatcgtttggaatgcattaaatgagaagataatacctgatgttgttgttgctgcaaagataggtgcactaccatatggcataaatgtattcaaggaatgaccatagtttcctgcatcaaaccctgagatcgttaacataataattgttaggagtggcacacctaatttaaatacagaaattaaacttgtaaatgatgttaataattttacagaccaataatttaataatgaaaagacaatgatgataatgtaaacaacaaataaaccaattgtacttacagaaccattatgcatcaatgcctgagttggcttagcccagtcccaaggccaagagcttatatattggactgcagatactgcttcaattggaataatcgttacgagtgatacccaatttgcccatgcagcaatgaagccaagtaatgacccatgtgtatattgagcatagttactcattccaccggattgtggaaacattgttcctatttcaatatagttataagaaatcgttccaataactatgaagcctatgacccatgagataatggctgctggtccagctactgaagatgcttcccatgctccaaagagccaaccagaaccaattaacgaacctaaaccgagtaacacaagctgcgttaggctaattttattatcgcttttattctttcccataaatactccttttaatttattttattttttataaaaaaacacgatataattatacgcttatcatttaattagtcaaactaaatatttaatagatttcaaaatattattaaaaggagtttattaaatttttttctataatataatgatgataatgttatgaaaaagtatgtagtgaaaccgatgtagaaagagaataaatgataaataaaaatagagatgataggcatagaatcgtatgatttgaaataatacaaaaaaccctgtaaagaaaacttctttacagggttaaaacatttaattaatatttttggtcaccatttaatttaactaggattttagcttgtgatttatcattaactaattgattgaatcctgattcaacgatgtcagctaattcaattttatctgttacaacgctcttaacatctaagctaccatttgcgattaaatcaattgtttgttggaatgttgttggtgtataagcaatagtagacgttaatttaacaccagagtttgtcaataacattggatcaaagttaacttcgtgtgcaaagattgaaacaatgacaacactacctcttgggcgtgttacttttactgattgtgctaatgttacgccaacaccagctacttcaaaggttacatctacaccgttttcagtgtgttcgtttacgaattctagtggatcagtatgaccagagtttacaacgtgagttgcgcccacctctttagctttagctaaacgttcttctgataaatcaaatacaaagattttactagcaccagctgctttagctgcaacgactgttaataaaccaattggacctgcaccaaagatagccactgtatcaccaaataataagttaccttctttaacagcttgcactgctactgctgttggttcaactaatgcaccttcttgagcagacacattttcaggtaagtgatacacattgtcttcaggtgcattagtaaattcagcgaaaccaccatctgaacccaatccgatgaatgtatacccatcatataagtctaaattttcttctttttcacgtgcagaaacagttgggtttacaacgacacggtcgccttttttatattttgtaacgtctttccccacttcttcaacgatacctgagaattcatgtcctaaagttacaggtgctttttgacctaagaatggatcaggtttgtcagttgaaataaatactggaccttctaaatattcgtgtaagtcagtaccacaaataccagcccaagatactttaacttttacctcgttatcttttaatttttttggttcacgatcttcaacgcgaacatctttttgaccataccatactgctgctttcatgatatataacatccctttcataataaaaacactttacaattatagattaatactagtaactcagaaattcaaatatatataaatgaattgttacacactttagaaaaatttgacaattttgcgaattttaattgtaggcaatataaaaaggttagaatgtactgtctacaatgaatagttgtatataaggaatattgaaattaaaaacttaaaaaaataattaggtaaaaaaattaattattacgtataaataatgtttcaaaaaattataaagggtatataagtataagtggtggaattttaacgatttctattaaaattcaattttttaaaactttattacgcaatggccatagggttcttgattgagacaatcaaaaatagaatactttggcttttttgtatttaaaattttccatcattaatacgatagaaggggacatcctatgacgcttagtataaagaagcttactaaaatttattctggaaataagaaagcagtcgataatatttctttaaatattgaagctggagaatttgttgcatttattggaacaagtggtagtggtaaaacaacagcattaagaatgattaatcgcatgattgaacctacagagggttcaattgaaatgaatggtaaagatgtacgtagcatgaatccagtagaattacgtcgtagtattggatacgtgattcaacaaattggattaatgccacatatgactatcagagaaaatattgtgctcgttccaaaacttttaaaatggtctaaagaaaagaaagatgctaaagcaaaagagttgattaaattagtcgatttacctgaggattacttagatcgttatccgtctgaattgtcgggtggacaacaacaacgtattggtgtagttagagcgcttgcagcagaacaagacattattttgatggacgaaccgttcggtgcattagatcctataactagagatacgttacaagatttagttaaagatttacaaaaaaagttaggaaaaacgtttatttttgtaactcatgatatggatgaagcgattaagctagcagacaaaatttgtattatgtcgaaaggccagatcgttcaatatgatacaccggacaatgttttaagatatccagcaaatgattttgttagagaatttattggacaaaatagactgattcaagatcgaccaaacatgagaacggttgaagatgcaatgatcaaacccattacgattcaagctgacgattctcttaatgatgcagtcaatattatgagaaaccatcgtatagacactatttttgtagtgaataataaacatcgtcttttaggttttttagatattgaagatataaatcaaggattacgtcaaggtaaagaattaattgatacgatgcagcgtgatgtttataaagtacatatcgattcaaaactacaagattcagtacgaactattttaaagcgtaatgtacgtaatgtgcctgtagtagatgatcatcatacattaattggactgattacacgagcaaacttagtagatattgtgtatgactccatttggggtgaagagaatgaaacgagtcactcttctaaaacctattcaaatgaagttgagcgagagaatgaacgtcaaaatgaaacgcaacaacatttaacatcgcaaggtacacaacgttatcatgaagatattatgaacggaacagatagagaacatacccataatacggatgatacgggagtggatcgttaatgagagacttttttgcacaatacggagatgaactcgtatcgaaaacgatagaacatttctatatttctattatttcgttacttattgctattgtcgtagctgtaccacttggtattttattatcaaaaacaaaacgtacggcgaatgttgtattgactattgcaggtgtacttcaaacggtaccaacacttgccattttagcgcttatgattccaatttttggtgtaggtaagacaccagcaattgtagctttatttatctatgtattattacctatcttaaataatacagtattaggcgttcaaaatattgataagaacattattgaagcaggaacaagtatggggatgacaaaacttcaattaatgaaagacgtggaattaccacttgccttaccattgattatcagtggtatacgtcttgcaagtgtgtatgtcattagctgggctacacttgcgagttatattggtgcaggggggttaggtgatttagtatttaatggtttaacactctatgaaccaccaatgattattagtgctacaattttagtgacttgtttagcactaattgtggatttcttattatctttagtcgaaaaatgggctgtacctaaaggccttaaagtatctagatagtttaaaagggaggaatgaacaactatgaaaaatattaaatgtatatttatcgttcttgcattgtctctcgtagtattatctggatgcggcttacccggtttaggtgacagtaattcgaaagacagtgtgaaaattacagcgactgaaagtagtgaaaccaaaatagtagcaaatattgagaaattaatgattgaacattatacaaatggagatatcaaaccaatcattattggaaatttaggttcaagtattgttcaacataatgcacttatgcgtggagatgctaatatgtcagcggtgcgttttacaggaacagagttaaccagtgtacttgatgcacccccaactagagatgcgaataaagctatggatgagtcacagcgattatttaaaaagaaatataatcaaaaatattatcattcacttggctttgaaaacacgtatgcgtttatggtaacaaaagaaactgctgataaatatcacttagaaaaagtatcagacttagaaaaatataaagatcagttacgcttgggtatggatactcaatggatgaatcgtgccggagatggatacccagctttccaaaaagagtatggctttaagttcaaaagtgcacgtccaatgcaaattggtttagtgtatgatgcccttaaaaacaaaaaattagatattgccgttggttactccacagacggacgtattgcggcatataatttgaaaattttaaaagatgaccgtaactttttccctccatatgatggcagtccgttagccacagaaaagttaattaaagaccatccagagattgataaagctttaacaaaattagaaaatacaataagtacaaaagaaatgcaaaaactgaattatgaagcagatggaaaaggaaaagaaccagccgtcattgcagaagaatttattaaaaaacataactattttgaagataagaaaggtggtcaataacagtgaaagggaatgtattaagttcgctttatgaatattacactttgaattttggctatctgatggaactcttttttaaacatttattaatgtctatatatggagtattgtttgcatgtattattggcattccaattggtattttaattgcacgttattcaaaaatagcatggccagtgattactattgctaatattattcaaaccgtgccagccattgcaatgcttgctatactgatgttggcgttagggctcggtccatcaacggttgtatttgcagtatttttatactccttgctaccgattattaaaaacacctacacaggtatgacagaggttgactacaatattaaagacgcaggtaaaggtatgggaatgactaataaccaagttatgcgtatgattgagcttccactatcgttatctgtgatcatcggtggtattcgtattgcacttgttgtagcaataggaattgttgctattggttcatttattggcgcaccgacgttaggagacattattattcgtggaaccaattctactgatggtacagtctttattcttgcaggtgcgattccaattgcattaattgcgattttaattgatattggtctacgtttattagagaaaaaattagatcccacacatcgttctagtaaacaagtacaaagtttaagataaattaaaagcgttgcttagacgatgactaagttgttacttagttcgtcagcaacgctttttttattagaataatagtgaagcaagtggtggtacgattacaacaataatcacacctacaattactactgcaatacttcccattgattcttctgtttctcctagttctttagcagcggcaacaccaagtgtgtgtccacttgtaccaagagctaaaccacgtgcaattggatttgaaattttaaacatttttacaatttttccacctaatgctgaaataacgacagcgttaaggataactgctaatgatgttaattcttttacaccaccgataccgtcagatactggtagggcaatcgcagttgttgcagcttgaggtaacatagacgcactaatttgatcacctaagtggaataatgttgcaactaaatagattaagattaaagctactagtgtaccaacagcaataccaccaaaaatttgtaaccaatactttctaagtacttgacgttttttataaagtggaatcgcgaaactaattgttgcagcttctaagaagaagttgataatatctccaccaattttatagttatcataactaatacctgttacttttaaaaagacaattcctgccaccatcgctacaaataaaggtgccagtaggaaaaagccatttgtttttttatagaaatattgtgcaataatatatggaattaatgagactaaaataccaaaataaggtgttgtaatacctaagtgatcaaccattagttttcctccttaagttgtgttttttcattttgttcttcagtagggaataatgtttttgttacaaataattgtgatacatagcccacactgactaataataataatgttgaaataataattaatagaataattaaaattggatgttgacttaaaagtggtaacgaattaataactgatacaccggctggtacgaataagaagccgatattatttgttagagcggtccccacaccctctacttgacgtaattttacgactcctgcacttaataaaataaataataatacgagtccgattaccgatgcaggcattggaaacggaataaatgattcaataatttttgaaacaaataatacagcaacaatagttaatacttggataaagaaattgtaagttttacctgctttcttatctccctgagtattagcggtagttgaattgtttttcgccatattgatactctccctctttttcttttctcttgatggtagtataaaatgaaaacgctttcttgagttggatttagaagtgagttacgaaaattaataggtgagttgcagtatttcccagttgaaaatcagaaagtgtttatagaacaacaaataagctatgaggtcattaaaaaagcttttaatctaacacttgatcatatgaagcgttaggttaaaagctaacttagaatagatattaaacaagaccaatttcttgtttgaatgatttcataaatgaacgactaacttgaaatttgacattcgttgtcattgtcacttgatacgtataattaaaccagtgttcgacactttcgatatactgcttattaataatcgtagctctatgaatttttataaacaattgcttaggtaatttcttctcataataattgagtggttctgtcgtttcatatgttttttttaaagtcgtaatagtagaaattccgttgttcacagaaatcgcaacaatatcgtctaaattaatgacataaatacgttcatccacttcgataggaagtacactttgattattataagaagaagtactcgtttgtgattgtggagagtgaataggatcagaaaatgtttgaatctgacgtttagcgtttaataatcgttttactttttgaactgcttgttcaatccgttctaattcaaaaggttttaaaatataatccactgcatctaattcaaatgcctttactgcaaacgtatcatgtgccgtagcaaaaatgatataaggggggtgtttcatttttcgaattttatgagctaactcaatcccattctcatccattaaattaatatctaaaaatactaaatcataggtatgacagagtagtttttctaaagtttcttcaatattttcagcttcatcgatgatttcgaaactagatatttcatttaataagtaatgtaattcattacgtgctaatggctcatcgtcaacaataagtgtcctcatttaacgttcctcctttattaaatggtatggaatcatacaggatactgttgttccatgattagatgtatcaaagtgtaacgttgcactagaaccatataaaccagtgaggcggcgatttaagttttctaatgcactgccagttccagtgtctgaagccacactgatttgtccaagtgagggtaatttttcaggcgctataccatgtccattatcactaactgatatttttaatgaggcttttttgtattgaacgtctacacaaacaatgttatcttttcgtcgatgtttgaatgcgtgtttaattgcattttccaccaaaatttgaatgataaatggtggaattaacacttgtttataggcatcatcaatatgatatttaattgtaaatcgatctggaaaacgtgcttgttctaatgataaatatgctttgacttgttgtaattctttttctaaagtaatcgtactattacgcgcaccttgtaagtttgatctgaaaaattggctcaattgcaaaagtaacttgcgtgctttttcactgtcaatacgtacgagtgctgaaatggtattaatcgcattaaagaaaaagtgtggattaacttgagcttgtagagacttaatttcagcatctcgtaacaatttactttgcgtttcggcaagtcccaattctaattgacttgaaaaaatatctgctaaacctcgagcaagttgtttagttgatgttgtaatatgattatagtctgtaaaataaaattttaaagtacctgcgacgtttccatccgtcattaagggcacaacgatagcttctcgaagtggacaattcggattattacatccaatgtcctctttggaattggcttcttttaattggcctgtgcgtatgacttctttagataaattagtaatgatttcttttttagcgacatgatgatcgctacccgcacctacgtgtgttaaaatatcggttttattagtaattgccacagcagatactttcattagcctcagtataatttcagctacaggacgagcagatttttcatttaatcctgaacgaaaataaggtagtgttttgtttgctaattcaaggacgtcatgagtttgaattgcacgtgtttgttcttcttgttttaaagtagacagaataatagataaaaataacgcagttccaatactattaattaatatcatcggtaaagcaataaattttaccaatgaccaagcattagaaacatcatcagcaaaaactaaaatacaagccatctgaatactttcgtttattaatccaattattgcacctattaaaacagttggatagcgattatgtctcatggtgcgatatccataaaatccagaaattaatgcaatgatgactgatgaaaataggtaagtataagcatttgctccaccaatgatgattcgtgataagcccgaaataataccaacgataatcgccacaaaaggaccaccaattaaaccagacattccaatcgttaatactcgtgtattcgcaagtgacgtttcgttatttagatgatagtaaatattactagaaataattttgccatgctcaatttcaatcccagtaaagttagaaataattgcgaataatgaaaataaaatggtgagttctatttgagcacgtaatttttcacgtgcactcataatcgtcttgaagtgattaatattcattaaaatgtaagcaataataataattaagcccacacgttcaagtaataaaataaataaattaaacatttttgcacctattaagtatattaataaaattcaaaagttttactacactttttattatagtatggaaaatttaaagttgatagtttaaaatgtttacttataaatacttagcacttaatttatattaaatgataatttattttggaaaacaatatttaaaaagaaaaaaagatttttatatcccatttataataagctatgataaaattttaatgtagtttaaaattatatagtttttgggcaaagtaggaggaatttttttataatggagtcttcaaaagaatttaagggagataatcggttactcgttggaattattattagtgtattaacattttggctgtttgcgcaatcattacttaatattgtgcccacactacaatcatcatttaatactgatttgggtaccattaatattgcagtgagcttatctgccttattttctggtttgtttattgtaggtgctggagatgttgctgataaatttggtcgcgtcaaaatgacttatttgggactaggcttaaatatcattggttcattattattgattattacaccagttccatggttattactgattggacgtgctttgcaaggtttatcaggtgcattcattatgccatcaactcttgcgataattaatgaatattacataggaaaagaaagacaacgtgcattaagtttttggtctattggttcatggggcggaagtggaatatgttcattgttcggtggattgatcgcttcaacaataggatggcaatggatttttattatttctattgctttgtcgatactttcatttttcttaattaaacacacgccagaaacaaaaaatgaaccagatactgatacaaacaataacggttcaaaatttgatgttataggtttgattttattagttattacattattaagtgtcaatgtgatggtaacacaagcatctgatcgtggattattatcacctgtcattctatcattatttggaatatttttaattgctggtatattctttgtccttcgtgaatttaaaactgagaacccacttgttgattttagtttatttaagaataaaggatatagtggtgctacactttcaaacttcatgttaaatggagtagcaggtggtacgctcatcgtagtaaatacatactaccaaagtcatttaggtttcacttcattacaagcaggattaatctctatcacttatttagtagcagttcttgtaatgattcgtgtaggtgaaaaactattacaaaaattaggtgctaaaaagccattgctcataggtagtggatttacatttttagggttactacttttatcactaaccttcttacctaatttgttttatattatttcaagtattattggttacctactatttggtattgggctcggtatgtatgcaacaccatctacagatacagcagttgatcaagcgccagatgataaagtgggggttgcctctggattgtataaaatggcttcatcattaggaaatgcatttggtgtagctttatcaagtacgatttatggtgtttgtgcagcgaaaatgaatttagaacttggtggtttggcgggcgtactctttaatgccatcatcgttttaactgctttctttgtcattttcttcttaattccaagtaaaactaaacgtgcttaattaaaactggatattcatactatttaaatctgaggtgcgctagagtgcctcagatttttttattgataaaagaataaatgtaaacataataatgagtccttatacagagtgataatgacttctacgtcaattattgaaaaataaaaatagttctaattttatcgaattattcagaatattttgtttatattattgacgatactttattaaagtagtattttaaaaataatattaaaagaaggagtcgaatgttatgaaaatagcaattgctggttcaggagcgttgggaagtggtttcggtgcaatgttatatcgccaaggtaatgatgttacactcattgatggttgggagccacaagcaacagctgtaaaacatgaaggtttacatattgatataaatggagaagactatcatttaaacatccctatgtatcaagatacagaaataccaagtgatcttcaatttgatattgtatttttatttacaaaagctatgcaacttgaaagcatgttaacacatatccagccacatattcatgatacaacaattatggtgtgtacaatgaatggtttaaaacatgaagaccgtattgtaaattatgtagataaatcacgtattgttcgtggtgtaactacatggacggccggattagaatcacctggacatactcatttaatgggtagtggtccagtagagataggttctcttgtgccagagggacagaataatgttgaagtgatatataatctattagaacaagcaaaacttaatccacataaaagtgaagacttgcaacaatctatttggaagaagatttgtgtaaatggtacagcaaatgcgttatgtaccattttagaatgtcgtttatcaacattaaatgaaagtgaatacgcaagaaaacttgtatatgacattactaaagagatagtagaagttgctactgttgatgatgtacatttaaatgcagatgaagtctatcattatcttatcgatttaaatgataaagtaggtccacatttcccatcaatgtatcaagatttgattaataataatcgacgtactgaaattgattacattaacggagcagtggctcgcttaggttcagaacatcatatcgatgcgccaattaatcaatttgtagcgaacatggtacatgccaaagaagagcaacgtcaagctaagtaaatagagtgcaaaagtgagttaaaagtgattaactcactttttaatttgtaatcattaagggtaaatataatatatagtgagataaggagttgtgaaattaatgaaacaatcaacgaaaagagttatcatgacgggcgttattggcggattattaagcggtgcagttaaaatgggatgggaagcactcatccctcctagaacaccacaacgtgaagaagaaccaccaccaatgacattactgcataaattgaatttacctgacaatgttaaacatgctacgtaccgttataacgagaacgatatacctataactgtcatgggcattcattatggcttttcaattgcaaatgctatcgtatatggattacttgctgaaaagtgcccaaaagtgacgacattaagaggcacattcttcggtattttgattcatattgcttttcatgaatatatactacctaaattaaatctaacaccacaagttaaagatttacctaaagaagaacgcatttcagaattattaggtcatattgtttggatgaatacgattgatttaatacgaaatagtcatcgataaataaaaaaggaagagcgtgagagtctcgctcttcctttttatataattaatcttatcaatggttagaagtgtctgaggatgtttctgaagtagtttgacgctttatttctatgcgttgtcttaatttttctccctcaattttaccgactttcgcataatgactatgagcaaaatgcatttgaataattaaaaacgttgcacttatagcccaatataaacttaacgctgatgctgaatgtaatgatgcataagtaataaataaaggggataagaccatcatgacataataagatcgacgttcatttttaggataatggattgagttgacaagaggttgtataaaatacatcacagctgcaatgatggtcatgatgatatcagtatgcattaaattaaaccataaaaaatgaggatgctgagtaataccaccacttgttggatatttaattgacgtatataatccgagaagaattggaatttgaattaaaattggaaatgtgccaattaaatttttaaaaggattgattccatactcattatattttttcattaataatttatttgctgcacgtcgttcttcaggcgattgagcttctttaattttttcttggattttattaatttctggttttacgacctctgttttgccacgaataacatgaatattttttacttgaatacacatgagtggcatcagtattaaacgcaatataaatacaatgacgataatagctaaaccatagttttcgttgaatgcatgtcctaagacatggagtaaatcatccatcggttttacaaatacagtataaaacaggccgtgttgtgcttctttatgagaatagtcacaacctgcaagcattattaaggacatcggtaataagaaccatttctttttcatatttaaactcctatacactggtctttaataatcttagtcttagtgatataagcttaacataataatgaagaaaagaagacatacatgtttgaacagcctatattgatcgtttagatagcgtgatcatttttaggataaaataactccatagacttgtcagtaataagacgaagctaaataatgttatttttgcttgtaatggtaaccatgacatcataaaacgccaatcagaatttgataataagagtattggaagtaagtgaagtatcgctaaaataagtgtgaaagttaacatcatcatacttattttgatgagtaatccaccagacatcgttttaaaataaatagacttaaatttaaaaattaagcgatagattattagaaaaacacttgctacagctatcagtaaaataatagtgatgatgataaatacgatattccactgattaataagatattgtaacgttttaatatgttgaccattactcatttgtgtattgagatgctgtgcaagttcggctacattttttgaatagctattagcaagaactacaatgccatagtcttttttgggatttaaaataatatatgaagaatagttttcaagtgtaccaggatgatatacaattgtttctgaatgattatcatcaataaaccaacctgctgcatagtgaacgtcttgagaattatctattgctttaactttaggctgatgcgttagttgaactaatgatgctactttttttggcggattaagttgaaacttcaaccaagaggctaaatctttcgtgttcgtcatcatataagcagctggattatctcctaaattaaattcaggactatcagcataagcttttcctttttttattacatacccttgagcgtcattgttctttttcatattactttcttttactgttgattgcgtcatatgtaatggagtgaaaagatgtgtgcttaaataattcgcatatgattgatgagaagccttttgaacaatcaaacctaaaatatcataattcatgttggaatactcaaattgcttgcctggtttagcatctaagttacgtcctttgatactatgaacaaggccttctagactgtttgtgtcttttgtgatgttgtcatcatttgtgatgtctcctgaaataccacttgtttgagcaatcaattgatctactgtgatatctacttttttatgattatatttcatatagaaacctggaatatactgactgactttatcattgagattgattttatgtgcctcaacaagttgcatcattgcataaccagtaaatgctttggtatttgaagcaatttcaaaacgcgtatttggtgtgactttggatttctttttaatatttgaaaaaccatagcctttattaagaatcgtcttattattttttacaataagaacggacattcctggaatatgatcgtctttcattttattaacaatcatgttatcgatatcactttgtgacgatggactaaacattaaataactagattttaatttaatagctatggaaagaataatgattcctactaataaaatcatcccaatcatgatcaatttttttctcattttcccttacttccttacttaatacttcttaaaattaaacctctaaaaatagtatagcaagtttaaacttaaacagctctatacaaatattaaatactgttgatacctctttaaaactggtaaaaagaaaatacttcaaaaatataattgtaaaaagttacttaaaatgtaatttatactatattatttccgtggaaatgtatactttttcactaaatgggagtatattttatccattaaaaatgaatataaaaagaggtaaggatggattatgttcactcaatttaaaagacttattattggtaagcccaaaaaaaatagagacttaaaaaatgaaaaaataagtaactttaaggctttagcaattttatcttctgacgcattatcttcagtagcatatggtccagaacagattttaattactttatctgtggttggagctattgcatcttggtatacattgcccattgcggccgctgttttagtgctacttgcagcattgattctatcatatcgtcaaattatatatgcttatcctaaaggcggaggagcgtatatggtttctaaaacaaatttaggagaaaaatggggattgcttgcaggtggctctttattagtagactatattttaaccgtcgcagtaagtatttcatcaggtgcggatgcttttgtcgcagcgtttccaggattatatcaccataaagtattcattgcatgtttattagtactatttattctaataatgaatttacgtggtttaacagagtcagcaactgtgctctcttatccagtttatttatttatacttggattaatagtcatgattgttattggaacatggaaagtggcaacaggacaaactgaacctcatatgcatgcgacagtaggaaccgcagtgccaggtgtcacattatttttattacttaaagcattttcttcaggtgcatcatctctaacaggtgtagaagccatttcgaatgcagtaacaaactttaaagatcctggttctaaaaatgcagttaaaacgttaattactatgggaatgatattagctttcttacttgtaggtattgtgggattagcatattggtatggtattatgccacagactgaaacaactgtattatctcaacttgcaatgaatattttagggcataatgtaggatattattttgtacaagtaacgactgttatgattcttgtccttgctgctaatactggattcacagcttttccaatgttagctgcaagtatgtcaaaagataaatatatgccccgtatgtttaacgtaagaggagaccgtttaggttattcaaattcaattattacattaggcatttgtgcaatgttgcttattatttttttccacggtaaaactgaaaatcttattcctttatatgcagtaggtgtgtttattccatttacactagctcaatatggaatggttttaaaatgggttcgtggtcgtgaaaaaggatggtctactaaacttattgcaaatgctatagggggtactattacttttatcgtatttatgattttcttaattacgaaatttagccaagtatggccaatcttaatttttttaccgattgttgtatatatatttacgcgtattaatagacactacaaggatattgctgagcaacttagcacaactaaaattgttcaagatatgccagtagttgataaaaatctagcgattgtacccgttaatacgatcactacagcattaaataaatctatttattatgcacatatgattgcagatgatgtgattgctgtacatgtatctttcggagaccaaactgataatttatttattgaaaaatggaacaaacaatatccagatattagactagtgacgttacactcagaatatcgcagtgtcattcgtccgatttctcgatttatcgataaaattaataaaaaagcgaatgctcaaaactatgtcatcacagtggttgtcactgaatttattcctaaaaaaccatggcataactttttacacaatcaaacgagtttgcgattaaaaatgcatttattctatcaaaaaaatgttattttagcgacggttccttataaattacaaaagtagaagaaaataaaaagaactcgagagatacaggtctcttgagttctttctatatattaatgatttaattcattggcaagtacaatttcattatagttaatattttcacgtaattgcgtggcaatttcattggtaactttatttttagaaatcaattcgtctaaaatttgacgctgagtatacaatgcatctaatttagcatcatattgttgttgagtgtttaattcatgcataaatttattttcttcacgttgatgttttcgattatgatgttgtcttaacgtacgtgatagtgcgtaatattggttgataattaaactgatttcgaggacatttgtgctattttgttcttcttgaagtctcaaagtcacctgacggttaacaatacgtataatgtgttgtacttttttaaagttatttcttaattcttttctgtcagtatagcgctgttgttcaaatgaggattgattcacactatgatgtgaatcttttcgcgctttaaatctaagtatgattaacttactaaaacgatttaatttctcaataaaagacatttctctaaatgattgtgtaaattccattactttgcgataatcacttaaatcttttttagtaatacgctcctgtttaattaattgttgaagcgtctcagtttcaacttcttctgcaatgtctcttaatcgatgtaattcttttgtatttttatcatcgctttccatgtcgattaaaaatgataattcattaaaatattgattcagaataggtcgataatcgatatctttgtgcgtagctgctttttcttttaatgtgcgaataacatgttgaatcatgaaaattttagcggattgataactcatacctttgaagtgtgagtgttgtttggatggcgtaatgaacggaagaatcatttgtgcaaaaattaaactgatgagtaccatcattgaagcaataaatagtaaatcgtttctatgatcaaagttctgattgccgttaataatgaatggtaatgttaatgccattgacaatgaaatcgttccatgaatgccacacaaagtcataataaatgcataacgactccgttttggtggttgtgtttcttcttcgtcatcgagatatgcttcaacatttttcggatagtaaaaatctttgaacaaaacatagacccaaataaatctaaagatatagatggcaaatgctataaggaatgctatcacaattagaaagactaaattttgtggttcattacgtacaatttctaaaataacttctggcacaatatatcctaaaacgacgaagacaaagccatttaatgcataacttaatgtattccaaatttgattatagttcatttgtaattcagtttgggcgcgaatgagacgatctcgttctaaaccatgaatcaacccagctaccacaactgcaataatcccagaagcatgaacttcttcagcaataaaataaatgacaaaaggagtaagtaattggatgaaagtcaatgtattactatcttttaaacctttattagaagtgaggtaaacacgtaaactgacgactaaagcgccaattattgcgcctactaaaataccaagaaatgttgagagtagaaattgaccaattgcatttatagctgaaaaactacctgtcaccagagcagtcactgcaattttaaaaaaaataatacctgcagcatcatttaatagagactctccttctaaaattgccatagaccctttgggtaatactttacctttagtaatggctgatacagcaactgcatctgtcggacataaaatagctgcaatagcaaaagcagctggcatcggtaagttaggccaaatccaatgaatgaaaaagccgactccaatcacagttgtaaatactaatcccatggccataagaacgacaggttttcgatattctagaagtttttctctagaaacatgtgtcccttccacaaataagagtggggcaatgacagccatcataaagacttctggttcaaatttaaaatgtagtggaatgggtaagatgaataaagcgacacctaaggctatttgaatgaaagctgttggaatgttggggaagcgatgataaataatagaactaatgataacagcaagtataaataataaaaaagcttctaacaatcccatatgtattgtgactcctttttttaaataattaatattttatcatgattaaaaagataatgagatattttagtatatttcattattaagacatagaaaagcggaactgaattcagttccgcttaaataaaatatctaatgattgattgattctcgaggttgctgacgtgttttttcagctaaatattcagcattttttttatactttttatagaacaagaataagaatataaaccaaactggtgaaatacatatggctactctcgtatcagcactaaagaataataatacaaatacaaataagaaaaatgcaagaataacataagccattgctttaccgcctagaagtttaaatttattatgtttatgttcttcaggatttttccgtacatatataatgtaagaaataatgatcattgcccaaacgactataaataatacagttgagagtgtagtgacataaataaataattgaattgcatctgggaagataaagtttaataatgcagctaaaagtaatgttccagaagataccagcattgataagtaaggcacactatgatgatttgtcttacttaacattttaggtcctaatccttgtttagataaaccaaataaaatacgactattagaataaataccactattcgttgcagaagcggctgctgttaatacgacaaagttaacaagtcctgctgcaaaaggtaagccaatcatactaaataacatcacaaatggacttgcatcagggttgatcttattccaaggaatcactgacatgatcacaagtaagcctcccacatagaataataaaattctaacaggtacattattaattgcttttggaataactgtgcgaggatctttagtttctccggctgtaacacctattagttcaataccaataaatgagtagacagcaatttggaatgacattaaaaatccagctggtccatttggaaaaataccgccatgatttacaagattactaaaagacgcatgaccatacgatgttttaaatgaaaagaaaatcataactaagccaacgataatcatagcaataatagtaataatttttataatagagaaccaaaattctaactctccaaataattttgcaccaagcatattgaatgaaataagtaagagtacgataaataatacagttagccagtgaggaacgtttggaaaccaaaaactaaaatattgtcccattgctgttaaatcagacatacttgaaacaatccaagataaccaatatgtccaaccaatgacaaaaccaccgaacggccctaaatattcgttggcaatgtctacaaatgaattgaaacgtgtattactaagtaacaattctccaagtgctctcataaaagcaaataacacgataccaataattagataggtgatgagtagtgatggtcctgttaacgaaatcgtttgtccagaacctaaaaataatcctgtgccaatagcgccaccaattgcaattaattgaatgtgtctattacttaattctctttctaactgtcttgccatagacttccccctaagaaagcaatatgataatcgagtaagcgctttcttcgaattttgaaaacttttttaacaaagtagaaaagagtaaagatcaatttgtaattaattagaatattcagatttttaaaagtttaccttttttaaattttgttaaatatgtaactttgttaaaagttaattttattatactcttaattttcaaaaaaacaaatatgtgtataaaactatgaaaaacagaataatttatatttataataatctatggcataatagataaaatttaaaaatgtattagaggagtagaggaatgagaatcggagcgatttctgatctacatatagatagacatcctaaattaaaatcaaatgtatatctagaaacattgattaaagtagtacaacatagagaggttgacttactattaattgcaggagatatttcgaactattttagagatagctatcaatttattaaagatttaaaaactgctttacatattcccgtactatttgttccaggaaatcatgattattggaaagtagaggatgaaacgacatctcaagatatttatgatttttatagaacaaagccagagtgtttgttggatcatccatatgtaattaatgataattgggctattgtaggccatactgcttggtatgattacagttacgctgataaaaagtttgaagaaactcgattaaaaaaagggaaatattatggggccacttggcaagataaagtgaaaatcgattgggatgaagatgatacgattttatccaaaaaggcggctaagcatgttaaacaagcattggagcaacttcaagataaacaaattattttaatgacacatattgtaacacattctaaatttgtagtacctacccctcatcgtatttttgattttttcaatgcatttataggtacatcagatttcgatcaattatatcagcagtttccgattaaatacagtattatgggacatgttcattttcgtaaatctttagttgaaaataatataacctttttatgtccttgtttaggttataaaagagaatggcgaacagcagatatatattcagaaatgaatcatgcattaatggactttgtaatagaataaaaaaagagcaagaaacgacgtttagaaggaagtcgcttcttgctcttttaatttatggttttacatagatacattttttaccaggggcgttaaagctacgctccatgaattcttttttaatttttataatctggaagcgattaggtactaatgcaggcacaattacttttcttaaaaagtgactccataaaggatcaatataatagtaatgtgtgtcgtcatatccaataagtaatgtaacgtgaatgttagacacaagctgacgcgtatagttatcaaatttaaacgttttacgtgaaggtttttgacctaaacttgtatgatacataagaaccggttgtccttgatcaatcacagtttctagttcctctaaattcgtaccagtgccatctacgatacgtgaatcaaaagtttgtaaatatggaacataagcagaagggaaaatcgtttggtgatgaccaaacttaacaagtaaatgatgaccaacatagcctttatagggattatttggatgagtgggccaatgtttcataatatcagtagctttaatattatgatgattatattgtaataacatagctgcagaaacgccttcacaacccataatcatagggattggaaaaagttgacttttaggcgtaacagataataattttttattcattaacgttctcctttatgacaataaaacattgttttaaagtaaatttattatataccttgattagagtagcgtataatcatttgaattctttgtattaacaaaatgtgtgtcaacatatttaagacaataagaagaatgttgatatagtaattgatgttaaaaattcaaacccaaaagtgattaaagacatcatgcttagaatgtatcttattcatatactaatttttaatatgcaacagaaagattgcacagttaatataaaataaaattgggagttatgcatttaaaaatgaatatatgcaaactcccaagtattattttattttgcagcatgaacaatatcattcatgttatgtttattgcgtcaaaaaactttattgcacattataccgatagataacattaaaggaccctgctttcttttgattctgtagatatgggtttagtctttaaggtgtcatagctttttatttaatctgattgtgttaaaaaagtaagtcaatcttatttttctaggatgcatgttatcgttaatacaaattaaaatttattaaataatacgtgattttcaagatgtacatgttcatgtgtttcacgttctaaatgctcaaggcgtgtgtagactaagcgccaagtattacatgcttcactaggtggctgatactgatttgttaaagcactcatttcttctaatagatgcccaatttgagtatgatcttcaactaaactttcaataacttgatgcgcattcttaacttgttcaccacgtgcaattttaatgagtaatggaaaatcatgattatcttctttatccatatgttcaagcataccatcacgatactggcgatataactcttgtaattgaagtaaatgcggatggtgtggtccatgaacttttgcaattttagtgacataaggtgaaaggtttttaaattcctcacgcattgtttcatggtaacgtgattgaatatattgaattaaggaaggggcatctaaatatttaacgttgatatttcctgttgagtgtacaggtaaatgattaatttcttctataattgtatcgacatttacttttttattttttactgcatttttaattgagatatttccaccacaacaaaaatctattccgtattttctgaaaacatccgaacttaatggaaaatcagtaacgacattagcaacaattgaatctttagtgaccataaataaatcctccttatttaattatagtttattatagtaaataataatcactttcaattagagaagaataagttgtcatgtatttgttgaaaagtcattacaaatttgtgaatgttaaaaatacttgagatataataattgtctcaaatattttttaacatattagcaatcgatatttatattaaaaatggatgctagattacgtttattaatataagaatacattagatacgttgatattttttaaaatataaaaattgaagtaaaactatgagaattgctgtgataacaattactgtgatataaggcattacattgtattgtcctttaagaccaactaaaggagacactaaaccaccaaggataaattgaaacaaacctagtaaactagaagcatttccacttccaccagtacgttcttccatagccattgaaaatcctaaggggccgattgaagtgacaggacaaacatttaaaaagaaagcgactaataaaagccacaatggaccttgtaatatcaaagtaaatacaatgagaagtacaccaataagttgaatgaaagtcaaataaattaagattttaaagcgatgtatacgttcaacaagcaaagcaacgatttgactcacaacaattaaaccaatgccattgattgcaatcattacgctaaattgttgaggtgtcatatggtatattttctgagtgataaacggagaagcagatgaaaaactaaataacataacataagttaatccttgcaaaaacattggaataataaattttggtcgtttaagtaaacgtccaaagtcagaaaatatatgtttaaaattggaagtaacgtgctcagagtgatgtgtggtcggcatattgaaagtaacgccacctaacataatcatactaatagctgttaaaataacaaagataattctccatgagccaagagaaagcgataaacctccaagtaacggcattaaaatagtcactataccatttacaaccataagagaagcaagaaatttagctagagtatttccttggtaataatctcctgcgaaagctttagcgataacaataatacctccggcagttaatccttgtaccaaacgtatcaataaaaatattggaaatgttgtaataaatatcgcactacatgaagctaaaacgaatacactaagaattattagtgcaattctttttcgacccaatacatctgataaaggtccgaatacaaactgtccaagcgctagaccaatcattgcaaaggatagggtaagttgtatgcttgacgttgatgtattaaattgttgctgaattgctggtaaagcaggtaaatacatatctataatcattggaccaaatgctgtcattgttcctagaacgataagtaatagcatcggcaatttagtatgtgttgagttatgcataattgtactccttgaaaagatttgcaatgtacattatataggtttttgagaaaatatgtaatttcaaatataaaaagctctaaaaagattgatttaatcaatttttttagagctgaaatttatcacaatacataagaatattaattattattaccaagaatactgtttagttttttcttgatatcatctactttattattgacatcatctaatagcgcattcactttgttttcatttgcgttgttttgttgtgcattatttgcttcttttaatttattaacttggtcttgataaaattgagttaatttagagtcttctttagtaatttcattattttttaatttatcaatttgagattgaatttgtctaagacgtgattcagtgtctattttatctttaatatcattttttgcatcttcaacttgtttcttaatattatcgctttgattttgaacttcttgttgataatttttagatacatcatttgttgcattataagtatgttgtttattttccgattcatttttataatcaatataagatttagtcgcaaaaatgccaataattaaaagaagaattgcaataatagcgattaaccaacgttttgattttttatttttttcattctcttcttcaagtaattgttcacgtctaaagtcacgatcgttatagtaacgattagcattttcatcataatcgccttgattttgatgatactcatgacgcggttcatttcttctgtaattttctttattttgacgtctctgttgacgttgttgatgctcgcgacttttttgattacgttgttgatattgatcatcgtattgatatgagtctttgtatttttcagtacgtttcatagatttcacctctttttaatcatttaacttaattaatcgagcaatattttcagcagtttgtgttaagaatcgttctccatgtgctaataaatagggtagttctgagggcgtttctataatgctaaacacactatcaattccatgttgatatacggcttgataattttttcccaaactaccgcatatcgcaatcacaggtaagtcgaattgtttggatgcttttgccactccaataggtgttttaccataaattgtttgtacatctatttttccttctcctgtaataactaaatcggcatctttaattctttcaagaaactgcgtttcttttaagacaatatcgataccattagataatgacgcattgaagaaagtgagaataccggcgcctaatccaccggcagctccagcaccgggtatatctttaacactgatatgatatgctttctctatcatatcatgataatttgcgagtgcggaatccaactttggtatcatcttttcagttgctcctttttgtggtccataaatatatgtggcaccattagggcctaataaaggatttgtaacatcacatgccacttcaaaggtaacgtcgtttaatctataatctaaatttgacgcatctatatgggtcaaatgagcaagagcaccaccaccaagttcaatttcttcattatcagagtttagaaactttacgccaagagcggtcagcataccactaccaccatcatttgttgcacttcctcctatgcctaatataattttagtcacatgatggtttagagcgtctttaattaattcgccaacaccaaatgttgtagtaattaaaggattacgttcatctgtacgaattaaatctaatcctgaagctgctgccatttcaataatagctacacgattatctctagaacgagcataagatgcagtcacttctctaaatagtggatcatgtactttaatgctatgaattgacgcatctaatgcttctattaaagcctcggttgtaccttcgccaccatctgccatagggataacctctgttttaagcgaatcaccgaatatatttttaaaaccccgttctatagctaatccagcttgtttagcagtcatactctctttaaatgaatctggcgcaataacaattttttttatgttcaacgagatcacttccgattaaaattataaataaaaatctaaattaaaatgatttaatgtttaaaatataaaaaaagtatataatggtatttaattaaatagaatcgattaaacactataatttaacattattgtagtggaggagtagtgtaaatgtctaactttaaacaacacgaattttacatctgggtcatagggttattattattttacggttacttaggtttaatcattcctttacatggaatcgattggttttttggaagtcctcaaggcataagtgccttttaccaacattttgataatttgaatggacgttatattagtaatttaattgagcttgtagcagtacgttcggtaatattacgtatgattatgtattcaataatatcagtaagtattattttattaatactcaaattgatacgccaaacattttcaattcgtcatctcatgcttgcaactattttattacttattatacctaattcagttttttcagagagttatggaagctttggttatttttttagttatgcttttggaatgatatgtgttctctatcatttttgttttataagtaaaattttatttacaaaagatgaactaaaaatgtacaatatcattttgttttggataagttgtttcagtgggcaattatttgctgaatcattaactttttttgttaatttagctttattcacgacattaatggcttattttatgttaaaacgtaaaattaattttaatttattaatagggtttctattatcattatgtggtacattaataatgttgattaaccagacgtacattaattatctgagtgacattcaagcaatgagagcacacattgatggcttaggttatgttcataaattaagagttacaatattaaatgaccttccacattatatgttttttaatcatattgtcatagtgtctataattgcgattgttataattgggttacttataaaaaatactcgctttcaaacgttttctaaaattagacaaattctattaatgattggcatacttgcattgcctatatacaagatatttatttttgaaccctttaattttaatcaaacaacgttgattacaagttatggtctaattaatttcttactatgctttagctttttcgtcagtataagtatggctagttttattatagttacagatagctactatcgtatcattttaatcgctgcttttatttctattattttaagtgcgatacctatctttttcatttcagaggtaacgtctcaacagttctttattgtatatataatgtggtgtgtgatattgattactttagttactgaattacatactttaaaacaaagctatgataatattcttaaaatttgtgtaggatgtttattattcgtatttattgctatttttacgattgtgcattttaaatatgaaactagattaaataatattcaaactcaaattcaacaacatagaaatgaaattattgtaaaacatttgccatttgagacatatttctatgaaatgactccaactgaagaaaccgcaaaggaaaatttcaaagagtactatcaaatttcaaataataaacaacttaaaatactgccgtttgatattaatgtaatagaagacagaggagattaactatgaagttaaaacaaacgcactatgaaataatcaaattcgtcatcgtgggtgggattaatacacttgattattatttagtgtatctcattttattaaaattattacacgttcactatatggtgagtcatattattggatttatagtaagttttattatttcttattatttaaattgttatttcgtttatagagttaaaccaacccttaagaaatttttaagttttccattaacacaagtagtaaatatgggaatgcaatctttgtttttatatatatttgtaagatggtttcatttcccttctgaaattgcaccctttgtaggacttatcgttacaattccaattacttttatattatctaaatggattttaaaagactaaaatttaagaaagagctagaaatatgtatttctagctctttttttataaatagtaaattaggcttgactaaaaaattaattagtttatttttataaaaataatagaaataaaaaaatattgtaattcaaatttcgatagtacatactattaatactaagtgtttaaggtggttaactagatatgacccaaagcgaaaatcttaaattggcgcaaagaggcgcttatttaagtttagttgtttatatcgttttatctgttgcaaaatatattactgggtatgtgtacgattcagcagctgtaagagcagatgcattgaacaacatgactgatattgttgtctctatcgctgttattgtgggattaaagatttcaattaagccagctgataaaaatcacccttatggtcatttgaaatctgaaaatatttcaacgcttctcgtatcatttattattatgtttgtaggtatacaagtagtgattgaaaatgcacctcgaattttgacaaatgaacaacatattccaaattttattacgattattattagtatgatgagtggtgtcattatgattggtgtttatgctattaatcataggcttgcaaaacaaactaaaagtagctcattagactcggcctcaaaagataatttatctgacggtttagtcagtattggtactgctattggattattatttacacaatttggtctacctatcattgatgtaatacttgccactgtattagggtgtttaattatttatactgggtttggaatatttaaagattcaatttttacattgagtgatggatttaaagaacaagatttagaagaatatcgaaatcttgttcaagaagttacagatgtaagagaagtaaagaatgtaaaaggacgttatcacggcagtagcatttttttagatgtaacgattgtagttgatgcaagtttatcattacaagaagcgcatgatatttgcgatagagtagaaacacatttagaaaataatggtatatcgtctgtatatgttcatccagaaccaaatacattaaatgaaaaataaaaaagagcgggagtatactcctgctctttttttattcaatttaccaccaaccatttgattctctaaaacgtatcgctgctccaattgatccataacgttcttttgcatattgaatcatgcctttcatttgggtttccactgatccatacccccatgattggttagtttggcctaatccatggtattgaccatttgatgcattagggttaccgccggattcaggaagtacaattttctcccacatttcttctgtgcctccagcagctaagaaacgttgatatactgattgtgtacgacttgaagtactagaagtggtcgtgtttgaacttgatatatttaaattagatgtatgactttgatgatattggtattgatgttgttgagaaggggatgttgataccttttctgcgtgtgcctgaccactttctactccagcggcacctaatgagagcattgtcattaatgcaaagattgatcttttcataataaaaaactcctttgtgatttggatattaatgttcgaattaaaacattgcatcccaataaatctagatgttgactacggtatgttcactataacagttcatttaatgacataggttactgtcatatcaagaataattatcaaatatgaacacgacgtaacacatatctcaacgttttatcatatattccgaattaaatgataagtagtcctattatgaaaaaaattgaaatcgttctataataatgttgtaaagaaaaatagatattaaattaaataatgaggaaagtatttataattcaatcatcatactcattaactttctattaatctaaggagtgttatattatgcccaaattaattttatgtcgacatggacaaagtgaatggaatgcgaaaaatttatttaccggttgggaagatgttcaactgtcagaacaagggagaaatgaagccatcacttcaggtaaaaaattaaaagaaaacaaaattgaaattgatgttgcctatacttctttattaacaagagcattagaaacaactcaatatttattagctgaatctgatcaagaatggattcctgttcataaaagttggcgtctgaacgaacgacactatggaaaattacaaggattaaataaagatgatgcccgtaaggaatttggtgaagaacaagttcatcaatggagacgttcttatgatgtattaccgccagcacaaactgaagaacaacgtcaatcttatttaaatgatcgtcgctatcgtcatttagatcatcgtatgatgccttactctgaaagtttaaaaacaacattagagcgtgtcattccaatttggactgatcatatttcacaacatttattagatggggatactgtacttgtagcagcacatggtaactctattcgagcattaattaaatatttagaagacgtatcagatgaagacattataggctatgaaattaaaacaggcgcaccgttaatttatgaattagatgacgatttaaaagtaactaatcattattatttataaaagtgtgagcaagaatttttatttattgtaatatagtagatagaataaaaggctaaagcattaaagaagtgctttagtcttttattaatgtagtggagtaagattgcttataaaaatagttaaacggttttaactaacgtcgatattgcttaatcatctttaatgcacgtttacgtgttttaatattagaactttttaagttgcgacgtgcagtttgtaaatctggtttcataaatattcctcctttttataaagaataaaggaaaagatggcttatgtaaatagtaattattacgatttaaaaataaaaataaggagatgataccatgtcgcatagtaaaaagttaattatgattttcactatgctattaggtggtttttttggtttattaaatgaaaccttgttgaccacagcattaccgagaataatgaaagattttcatattgaatattctcaagtacaatggctcacaacagccttcttactaacaaatggagtagttattccattatctgcatttattattcaacgttatacaacaagacaggtcttcttaactggaattattatattctttctaggcactttactaggaggatttagccctaatttcattactttattaattgcaagaattatccaagcattaggttctggtattatgatgccactaatgatgacgactatattagatatatttgaaccgcacgaacgtggaaaatatatggggatgtttggattagtgattggtttagcaccagcgattggacctacattatctggatatttggttgaatacattaattggagagcattgttttatgttgtagcgccaatttcagcagtgacctttatacttgctttaatttttattaaaaacgttggagtaaaagtaaaagcacccattgatatgctctccattattttatctattatcggatttggtggtatgttatacggggtaagttctatttctcagaaaggttggtatgacccagtcgttctgagcactattattttaggcattatttttgtagttttatttatttggagacaagaacgacttgaaacccctctattaagttttaaagtatttaaaaataatcaattcacagtaggtattgctattatggctgtaacgatgatttcgatgattggatctgaaacggtattacctatgtttgtacaaaatgtgttgcaacgtacgcctgttgattctggtttgatattgttacccggagcaattgtaatggcaatcatgtctatcatatctgggcgtttatacgaaacgtttggagcacgagtactttcaatgataggtatgcttattgtaacgattacgacgtcctactttgtagtaatggatgagcatacgtcaacaattgttttagcaactatttatgcgattcgtatgattggtattgctttaggattaatgcctgtaatgacacatacaatgaaccaactcactccagaattaaatgcccatggatcgtcaatgacaaatacaattcaacaagtagcgggttctattggtacagctggtttagtaacaattttaagtgtagcaagtcagcattttaaaccgacactcagtgattatcaaggaatggctaaaacagagatgatgaaacacattcaaacagacgcaatgatacatggttatcattctggctttttatttgcagtcattatcacagtcgttagtttattattaacttttttacttaaacgaaaaaaggatttaaatgaagaaaggcattaacctcatatctaaacattctattttatttaatagtttaaatagttattgactattcatagtgatgagattagaattaatttattctgactaatttaataggaatatggaggagttattaatgaaaagacttttatttgtagctttgacacttatttttgtattagccgcatgtggtaatagtggttcatctgacaaaaatagtgattcaaaatcaagtagcagtaatagtgataaaaaaacattacgtgtaggaactgaagggacttatgcaccttttactttccacaacaaaaaagatcagttaactggttatgatattgatgtaattaaagctgttgcgaaagaagaaggatataaacttaaatttaatgaaacatcttgggattcaatgtttgctggtttagatgcaaaacgttttgatgtcattgcaaaccaagtgggtatcaataaagaaagaaaagaaaaatataaattctctaacccttacacttattcaagtggtgtcttagttgttcgtgatgatgagaagaatattaaatcatttgatgatgtgaaaggtaaaaaattagcgcaaacatttacttctaactacggaaaacttgctaaagataaaggtgctaacatcactaaagtagatggtttcaaccagtctatcgatttattattatctaaacgtgtggatggtacttttaatgatagcttatcttatttagattataaaaaacaaaaacctaatgctaaaattaaagcaatcaaaggtgatgcagaacaaaataaatcagcatttgcattctctaaaagtgtcgatgataaagttgtttctgatttcaacgatggtctgaaaaaacttaaagagaacggtgaactagcaaaaattggtgagaaatggttcggtgaaaatgtttctgagcctaaatagtcaacaacaacacgcattagatgcagcaactcaagcatttggacccatgttggaaggtttagtaaaatactctattccaattacaattgtgacatttattttaggtttgattatcgctttgtttacggcgttaatgcgtatttcgtctagtaaagtattaagaggaattgcacgtgtatatgtatctattattcgtgggacaccaatgattgtacaactctttattatcttttatggtattccagaacttggacgtctaattactggaaatgcagacgaacaatggacattgtcttctgttgtttcagcgattattggattgtctttaaatgtgggtgcatatgcatctgaaattatccgtggtggtattatttctattccaaaaggccagacagaagcggcatactctattggaatgaattatcgtcaaacgattcaacgtattattttacctcaagcgattcgtgtttcagttccagctttaggtaacacattcttaggattaattaaagacacatcattactaggatttatcttagtagctgaaatgttccgtaaagcgcaagaagttgcttctacaacatacgagtactttacaatttatattctcgtagccgtgatgtattgggttgtttgttttattatttcagtcatccaaggcttctatgaatcatatattgaaagagggtataaggcatgattgagttatccaatattcataaatcttttaatgataaagaagtaattaaaggtattgatttgaatgtaaagaaaggtgaagttgtcacattaattggtcgttccggttcgggtaagactacattattgcgtatgattaatgcgttagagattccaactgaaggcaacgttactgtgaatgataaaacgtatactgctaaagataagaaatctcaaattgaagtacgtaaacaatcagggatggtattccaaagttataatctttttccacataaaacggctttagaaaatgtgatggaaggtttagtaactgtaaagaaaatgagtaaatcagaagctaaaaatagagcattagacttacttgaaaaagtaggtttgacacatgttaaagatcaacgtcctcatgcactctctggtggtcaacaacaacgtgtggcgattgcgagagctttagcgatgaatcctaaagtgatgttatttgatgaacctacatctgcacttgaccctgaacttgtaaatgatgtgttgaaagttattaaagaattagcaaatgaaggcatgacgatggtgatagttactcatgcaatgcgttttgcaaaagaagtatctaataaagttgtatttattcatgacggtgaaattggtgaagaaggttctcctgaagaattatttgatcaccctaaaactgatgaattaaaacgttttttaaatgtgattaatgaaaattaaaaaagaatcgtcgtttgagatatttcatcttgaacgacgattctttttattgaataatgctttctttcttcagataaatagattttagaaatatttatattttaaactgatagtaaaacagtaagctcaaattgaagtactttattctcatattgattaaatgtcataatttcaacggttaaactaccaaattgttttttcaattttttatctaaaactttaacttttacatataagttgtcatttggatagacaggtttaataaaggttacattatttaaatgagtccctgctataatgtcttcttcatatttgttttcttcaatccaaagtttaaaggaaagagaaagggtatgcatacctgatgctataatccctttatacattccttgacctgcttttttcttatctagatgcatatattgagggtcaaattgatgagcaaactctaatatttctttctcagttattttgtaatgtttactaatgaatgtatctcctatagaaaacatactgtatttcatagttatatgcctaccttaaagtatacttataatgcaatgattatcttctgtttttgatccattgttgagtatgataaagaacaggtttaattggtttaatgaagtcaccaatatattcataaacaccagcattaaagccttttttgaactgttggacaccataatcttcagcattttcactaaagtctccagtaataccatagaagttgtaacggtcaatgttatgctctttagcaaatttaatcatttcccactgtaaacgataggctcccatatattcattatattttgggttagaaccactagataaataatatacttcatgttcattgtagatatataatgcagctgctagatttaatacttcaccttctgctgcaattttatcttttgtttggtttattttacgttcattgctatcaaattgttgttgaagttgattacgtttatttttgttctttttagagttagggctttcttttaaagcttcttcaatttcagtaagttgttttgttaaatcctcatgtttatgttgtagagtagacaaataatcttttaaatcgatataagctaactttagcatggcatgatctttatatgttttttgcatttcatagaaataaggctcatctctaaatttaaagccatgtttttcttcagccatttggaacagttcgaagaaagtatgtgtgtcttccataggtaatgttttaacttttacgcccatttcatacgtctttttaatattacgacgtgtttgatagtccatttcttttaataattggtcttcagttttatctttaagatcaagtacagacaaccaacgaatttgactcattgtactataacctacagaccaaccttgatgtttatatcctaagtcttcaagcgttttaatcactgcacgattatcgtagctttttaaaatttctccatctgcattacgtaggttttctaaaatatatggatctactaaaacaaatagacaattttgtttttttaaatattctgttagtgatttgaaaaagaagtgaaccagtttgatattgctataatccattactggaccacgatgtgtgtaaaaatatttataaaatttcaatgcgcgtgcttcagtcattaatgttgctgcaatgacatctccactatcatctttaacacctacaacatgtacatcatgtttcatctcatttctattatcaaagtgtattcgagattgtgtatagtgagaaaaatgttcggatgtgaatttttcaaattcttcaggtgttaaacttacgaatttcatgattatctactcctctgtgtttttaagaattctaaactattttatcaaattagttctattattacacacatttagtaaattaatttgctcatgctttagtattagataataattattttttaaaatatataactataaaatttaaaatataatattttttaatagtctagtttatattgcaaaaccactgtatgataatcagtatatgcatagtataatagtaagagttatattaggttaaattagaaaaagtaggagtgaacatatttgaaaagattgattttatcattaactgtatgtgtcatattgctagcgggttgcggtaatgatgaatatgctaataaaatagataaagctgtaaaactacaagataaaaaacaagaacgacttgctaagaatgaacaaggcgatgtagtaaaacactttgataaaaaagacgctaatatatatgtgtatgaaaaaggtaagtatgttgtattagcatatagaccattaagcaacaacgatgaaatgcattattatacatatcaatttaaagataagaaggcaacctacttagagcactttgatacgaaacaatatattagtacacatgattcggattataaggaagaaaatcttaattaactgaaacaatcttaaggagtatatatgaaaaaattgatttttattggagctgcgatcatatgtttaatcattatcgttgtcgcttgctctcaaaagaaaaaagaaacaaccccagctcatacgagaaatgggaaaattttaattgtagaatatggagactataaatgtccttattgcaaaaaaattgaagataacgtcatgcctatcataaaaaaagattatattgatacaaataaagtggaatatcaatttattaatgcaagttttcttggaaaagattcattaatgggctctagagcagggaatgctattcaagctattgcacccaaagaatatcttacattccaaaaaaatatatatgctcatcaacaagatgaaaaaaaacattggattactgaaacattacttgacaaagaaattgatcaattagatatttctcaaaaacaaagagatcgcattaaaaaagagtataaaactaaaaacagcgatgcttggaaggaagcagaaaaacagaaaaagttaacaaaagaaaatcatattcaatccgttccaacagtttttatcaatggtaaaaaagtaaaagatccttataaaatcaaagaatggaaaaaatatttatagcataatacaaaagatctaacttaatgttgtttaaatattaaattaggtcttttaattatgtttttatatcgtttaagacatatttaaaaattttacattcaaaatcattatttttataaaaaaagggaatacaaataaaagaaacaaaatcagcacaattaatatattttaattaagtcgcttagtttgtaatttttgttagatttatttaatatactaagtataataattatatcaaagtaaaagataaataaattgaataatattattttatcatttcactattggagggaaaataaatggctaactttaatttagatccagttcattcaggtgtgaatttctcaatacaacaccttgtaattagtaatgtaaaaggacgttttaacgattttgatgcagatattacaggtgactttcatgatttaagttctttaaaaggaacttttactgttcaagctaattctattgatactaaagtagaagatcgtgataatcatcttaaaagtgaagatttcttaaacgttgaacaatatcctgaaattaaatttgaaattattagtgttgatgatcattcagttactggtaatgtaacaattaaagatcaaacacaaaaagaaacatttgatttagattataaaggtattagcttaaacccacttaataataagaatacagcaggtttagttattactggtgaacttgatcgtgaaaaatatggtgttacatttaaccaaccattagaaactggcggttttttattaggtaaaatattaaatgtggaattcgatttagaatttcctattgaagaataataaagttaaaaaacaggcaaggttctaactttgcctgtttttttattgtcttaaaatataatagttgctaaactataggaattatcatttttaaaatcaggagagataacgatgtcaattgaagtaaaagaaaataaaattatttttaaaagaacatttaaagctcctatcaatgatgtatttgatgcctatacaaatccatcgttatttgagcgatggtttcatcctcaaggcgctaagacaaaagtatatcgttttaatactgaagaaggcggggaatccttctttgctatagaaacctcagaacagacaagctatacattaactgaatatcgaaaagtggatcgtccgaagtatcttgaatactttgattactttgctacacctgagggagaaaaagatacgcgtttacctggtatgcatatttcaatcaattttaattcagataataaacaaatgactactattacgtctacgtcagtgtttccaactaaagaagcagctcaacaagcggtagatatggggatagaagcaggtatgaattcaacattagatcaactagaagtcttacttaatgaataaatcgtcatgagaatgtcaaatttaaattgaacttttaagttataataatgttgaaaagaggatgatatagtatgaaagaaagatatttaaaagtgctgggcttattttcaatcagtactttaattccaacattattaattaattcaaaatgtctaaataatggcgtcataaagtatattttaagaacggcattaggctatggtatttttgcttcaggattacgttatttttcaaaattaaaaaaagcacattaatatcatgacaagagcaagatatggaaaaaatctccgtattttgctcttttttaatctcctctattcaaaatgcacgttactatatataatataaaattataaatgaattaaggagagggaatatgacaagcaaccatacaacgattaaagatacatatgctacaaaagatattattaaagcggctgtaggacaggtacaaatgaaagaagttatggcaactcagacacctggacgatatttactaaagtcaatgatgtcaggatttttactagctattgttacagtatttatgttagcaatcaaaacacagtttgcaggaacaaatgatggccttgttaatttattaggagcgatttcatttagtttagctttagttctcattgttctaactaattcagaattactgactagtaattttatgtatttaactatcggatggtactacaaagttattacagttaaaaaagtgttatacatattcttattttgtttcattggaaatatgataggtggatttattttattcttattaatgaagggtacacatgtgatgacacctgaaatggttgcaagtctaagtaaaacagtacatttaaaaacggtagaatcaacttggttaaatattcttatcaaagggatattctgtaacttctttattaatattggtatttatgtttcaatgctttttaaagaaggtttagctcgcgcatttttcattgctgttggtgttatagtatttgtatttatgggatatgaacacgttgtatttaatgctggattatatgcaggaatgattttttataatagtgatgcattatcatggatagatgtgctaaaaaatatagtatttgcttttgtaggtaactatattggtggaggtatttttgtagggcttgtttatgcctatttaaacggaaaaagagacagtataaaagcatagtaagacgatcaaagagcggaaatatcgagagacatttccgctcttttaatcctcaacatattgacttaatattcagaaaatcttattattttaatcaacattaaaataataagggggaaaccatttggttgcgaatattctagtagctcatggcatgagaaaaggagatcaaaataaagcactcggtgaatttatagatagtttattacaagatgaaacttacgcttatgagcttgcttttattgaaagtgaagaaaaaagtgttgaaaatacgattattaatttaatagaaaaaggagaaacgcaatttaaagttgtacctttacttatattttcagctatgcattatattgtagacattccagagatgttaagaaacattaaacaagcacatccaaatataacctatgaaattagtgcacctcttggtacgcatccatatatggtagatttagtagaacaacgtattaatgatgtggatataaaagaagagtcagatgtggcagttgtattgattgcacatggtagcttttcttatactaaagcacatgatgaactaaaagaattgagtactaagtttaagcaagacaaacctatatattgtcgtacgttatatggagatattacgtttaaaaatgatttagatcaactttcaagacaatatcatcatcttattgtggttccaatgtttttatatgatggacgtttagttaataaagtaaaaggtcttatatcagagatggatattgctaatgaattgcacatgactccgtctattaatttcgaccctattttaaaatcgattattcgagagcgattaaaagaattaacagtatagtaactacatacatctttcattatatgagtgctaaattctcacttatgtaatggaaggtgttttttattagggaaatccccgattttacattttaatgtgaaaataatcacaattttaaaagaatatggtataaaatagccttgtaaagaatagtgagttcaaaaatatttgaagttaataataattaaatgtaataaaaggggtattgatatggctaaacaaaaactcgtaatgattggtaatggtatggctggtttaagaacaattgaagaaattttagaacgttcagattctcaatttgacattacaattattggtaaagaaccttatcctaattataatcgaatcatgttatccaacattttacaaaagaaaatgacagtcgaagaaacgattatgaacacttatgactggtataaagaacatcatattgaactaattgtagatgatccagttgaaaaagtagatagacaatccaaaactgtcactacatctaaaggtatcactgtagcttatgatatctgtatctttgcgactggttcaaaggcatttgttttacctatacctggatcagaattaccaagtgtcatcggttggcgcacaattgaagatactgagcgtatgattgaaattgctaaaacaaaacgacgtgccattgttattggtggaggtcttcttggattagaatgtgcaagaggattaatggatcaaggtatggatgtaacagttcttcacttagcagaatggctgatggaaatgcaattagaccgtaaagctggagatatgttaaaagctgatttagagcgtcaaggtatgcatatcgaactacaagcaaattctaaagaaattataggaacagatgatgtagaagctattaagctagctgatggtagagtaatagaaacagatttagtcgttatggctgttggtatacgtccatttaccgaagtagctcgtgaagcgggattagaagtgaatcgaggtatcgtcgttaatgattacttgcaaacatctgatgaacatatctatgccgtgggtgaatacgcagaacacaatggtaaagtatatggtttagttgcacctctttatgaacaaggtaaagtgcttgctgattatttaacaggtaaagagactgaaggatataaaggatctacgacatttacgtctttaaaagtatcaggttgtgatttatatagtgcaggacaaatcgttgaagatgaaactgtacacggtatcgaaatctttaacagtgtagataatatttacaaaaaagtctatctaagtgatggtcgagtggtaggtgccgttttatatggcgatacagatgatggttcaagattttatagtatgatgaaaaaacatgaatcactagaggactatacactagtgtcacttcttcataaaggcggagaagaaagtggaacttcaatagcagatatgcctgatgatgaaacaatttgtggttgtaatggtgtagataaaggtacgattgtcaacgcaattacaacaaaaggattaactactgtagatgaggttacaaaaacaaccaaagcaggaaattcttgtggtaaatgtaaaggacaaattggagaaatactaaaatgtacattaggtgatgaatttgtagctgctaaaccaacaggtatttgtgcatgtactgatttgacacgtgatgaaattgttacccaaattagagctaaaggtttaaaaacgtcaaaagaagttcgtcacgtacttgattttaaagataaaaatggttgtccaaaatgtcgcccagctattaactattatctaaatatggtatatcctcatgaacaccaagatgagaaagcatcaagatttgcgaacgaacgttatcatgcaaatattcaaaatgatggtactttctcagtgattccacaaatgcgtggtggtgtcacagatgctgaccaattaattcgtttaggtgaagtagcgaaaaaatataacgtgcctcttgttaaagtaactgggtctcagcgtgtaggattatatggtcttaaaaaagatgagttaccaaaggtttggaaagatttaggtatgcgttctgcctctgcatatggtaagaaaacgcgttctgtgaaaagttgtgttggtaaggaattctgtcgatttggtacacaatatacgacacgtttaggtattcgattagaaaaaacatttgaatatatagacacacctcataaatttaaaatgggtgtctctggttgtccaagaagctgtgtagaatcaggtgttaaagactttggtgtcatttcagtagaaaatggctatcaaatttatattggcggtaacggtggcacagaggtcactgtaggtcaattactcactactgttgaaacagaagatcaagtggtacaactgtgtggtgcgcttatgcaatattacagagagactggaatatatgctgaacgaacagcaccatggcttaaacgactaggatttgatcatgttaaagaagtgcttttagatgaacaacgtcaaaaagaactttttgatagaattatggatgctaaacaagcacttgaagaagaaccttgggaagctattgttgaaaataaagaagcacaaaaaatatttgaagtcgagaaagtgtgaggatgagtgtaatggaaaaagttaaagtaacaactatggatgaattaacaccattaattggtaaaaaagttattgttaaagataaacaaatcggtatatttttaacagaaaatggacaagtgcatgctattaataacgtgtgtccacataaagaaggaccgctatctgaaggtactgtaagtggagaatacgtttattgtccactccacgatcaaaaaattgatttgaatacgggtaaagtgcaagaacctgatacaggttgtgttgaaacatatcaagttgaaattcaagatggagacgtatttatatgtctctagtcactaatagtgaatttggaaaagtatatttaattggggctggccctggcaatcctaatttgctaactaaacaagcagaacgattaattcgtcaagcagatgttattttatatgatcgtcttgtcaatccattgatattacaatatacaaagccaactactgaaatcatagatgttggaaaaaaaccttatactaaacatattcaacaagaagatattaatttaaaaatagtagcagcagcgaaaaagtataaagttgttgtacgtttaaaaggtggagacccagcagtatttggacgagtaactgaagaaatagacattttaaaagaacatcagattgcctacgatattgtacctggggtaacttctgcgagtgcagcggtagcttcattagacttaggtttaacgatgcgttcagtagcaccaagtgttacattttctacaggtcattttaaagatgatattgatcaagacatggatatacgtaatttagctaatggtgggactttggcaatttatatgggaattaaacgattaaattatattattagtcaaattagaagatatactaaagaagattatgatattgctatcatttttaatgctacgtgttataacgaaacaatagtagttggtaaactaagcactattgaatatcaattatctaagcttaatattaaacatgatccaggaatttgtatattaggccatatcattaactatatggatgacgaaaagattatacactcaaaacaaacaatagatgaaacattgtacgttattaaagggaataaagaattagcactttccaaagcagaagacttatctcaacagtatttaaaatgcttaattcaatatgatgaaacatatcattcttctcaaaagtatttatatgaatcgattataacgcagcaccaaaatattaaatatattgaagtatagttctttacgcttcgaatgtcataagtgagataacacgatatttaaaacgtgtgttatctcactttttttagggattcttttatatgaaataggtaattccctaatataaaaaccatgtgaaaaaatgtacaatttaaatgaaatttctttaaataacattgaacataagtaacgtatgacctttgcaggtaggaggatttatataaatgggaaaattcggattaaactttttcaaaccaactgaaacgtttaatggaaattggtcagtcttagaaagtaaaagtagagaatgggaaaaaatgtatcgtgaaagatggagtcacgataaagtagtaagaaccacacatggcgtaaactgtacaggatcgtgttcgtggaaagttttcgttaaaaatggtgtgattacgtgggaaaatcaacaaattgactatccaagttgcggtccagatatgcctgaatttgaacctcgtggatgtccacgtggtgcgtcattttcatggtatgaatacagcccacttcgtgtgaaatatccttacattagaggtaaactattagatctatggacagaagcacttgaagacaataatggaaatcgtatcgctgcatgggcatctatcgtcgaagatgaaaagaaagctaaattatataaggaagcacgtggtaaaggtggacatgtacgtgcaagttggaaagatgtaacagatattatcgcagcacaaattctttataccattaaaaaagatggtccggatagaatcgctggttttacacctattccagcaatgtcgatgattagttatgcatctggtgcgcgttttattaatttattaggcggagaaatgttaagtttttatgattggtatgctgatttaccacctgcatctcctcaaatttggggtgaacaaactgatgtacctgaatcaagtgattggtacaatgcctcttatatcattatgtggggatctaacgttccacttactcgtacgcctgatgcccattttatgactgaagtacgttataaaggtgcaaaagtggtgtctgtagcaccagattatgcagaaaatgttaaatttgctgataattggttagcacctcatccaggaacagatgccgcagttgctcaagctatgacgcatgtcatcttacaagaattttatgaagatgaaccaagtgatatgtttgttaattatgccaagcaatatacagatatgccatttgtattgatgttggatgaagatgagaatggttataaggcaggacgatttttacgtgcaagcgatttaggcataaaaagtgaaaatggtgagtggaaaccagtgattcacgatgcaattagccatcgacttgtcgttccaaacggtacaatgggtcaacgttgggaagaaggcaaacaatggaatttaaaacttgaaacagaagatggaagtaaaattgatccagctttatctgttgcagaagaagattatgagttacaaaccattcaattcccttactttgatagtcaaggagacggtattttcgaacgacctattccaactaaaaaagttaaattggcagatggtaaagaagtacgtattgctacagtatatgatttaatggctagtcaatatggtattaaacgatttggtcatgagttagaagctaaatcttatgaagatagtgaatctaaatatacacctgcatggcaagaaaacgttacaggtattaaacaagaattagtgacacaagtcgcaagagaatttgcacaaaatgctattgatactaaaggacgttcgatgattattatgggtgcggggattaaccactggttcaattctgacaccatttaccgtgctgtattgaatttagttctcttatgtggatgccaaggtgttaatggtggaggttgggctcactatgttgggcaagaaaaatgtcgtccaatcgaaggatggaatactgtagctttcgctaaagattggcaaggtccaccgcgtttacaaaatggtacaagttggttctattttgcaactgatcaatggaaatatgaagaatctaatgtagataaattgaaatcaccacttgctaacaacattaaacatcagcatccagcagattataatgtgacagcagcacgtttaggttggttgccttcatatccacaatttaataaaaacagtttgttatttggtgaagaagcaagagatgcgggcgatgattcaaatgaagctattttaaaacgtgcgattgaatcagtgaaaaataaagaaacagaatttgctattgaagacccagacttaagaaaaaatcatcctaaaacattatttgtttggagatctaacttaatttcaagttcagctaaaggtcaagagtactttatgaaacatttacttggtacacgttcaggattaatggctgaaccaaatgaagatgataaaccagaggaaattaaatggagagaagatacagtaggtaaattagatttacttgtatcattagattttagaatgactgcaacgccgttatattctgacattgtgctgccagcagcaacttggtatgaaaaacatgatttatcttctaccgatatgcatccatttattcatccatttaatccagcaattgatccattatgggaatcacgttctgactgggacatttacaaaacattgagtaaagcaatttcagaaatggctaaagattatttaccaggcacatttaaagatgtggtaactacaccacttgctcatgattctaaacaagaactaggttccgaatacggtatcattaaagattggtctaaaggtgaagtagaaggtattccaggtaaaactatgcctaacttctctattgtagaacgtgactatactaaaatttatgataaatacgttacattaggacctttacttgagaaaggtaaagtaggggcacacggcgttagttttagtgttaaagaagaatacgaagagctaaaaagcatgattggtacatggaatgatgacgatgaacattctgttagaaatgatagaccacgcattgatactgcacgtaaagtagctgatgcaattttaaatatctcttcggcaacgaatggtaaattatctcaaaaatcatatgaagatttagaaaatcaaactggaatggaattgaaggatatttcaaaagaacgtgcatctgaaaaaatttcgttcttaaatattacagctcaaccaagagaagttatcccaacagcagtattcccaggctctaataaaaataatcgtcgttattctccatttacaacaaatattgagagacttgtaccttttagaacgctaactggaagacaaagttactatatcgatcacgaagtattccagcaatttggtgaaagcttaccagtatataaaccaacacttccaccaatggtatttggcgcaagagataaaaaggtaaaaggtggacaagatgcacttgttctacgttatttaacacctcatggaaaatggaatattcattcaacatatcaagataatgaacgtatgttgactctattcagaggaggtccagttgtttggctatctaatgaagatgctgagcaacatggtatcaatgataatgattggcttgaagtttataacagaaatggtgttgtaactgcaagagcggtaacgtcacaccgcatgcctaaaggcacaatgtttatgtatcacgctcaagataagcacattgaaacaccaggttctgagattactgatactcgtgggggatcacataatgcacctacaagaattcacctaaaacctacgcaattagttggaggatatgcacaaattagttatcacttcaattactatggaccaattggaaaccaacgtgatgtgtacgtcgcagttagaaaaatgaaggaggtaaattggcttgaagattaaagcgcaagttgcaatggtattgaatttagataaatgtattgggtgtcatacatgtagtgtgacatgtaaaaatacttggacaaatagaccgggtgcagaatacatgtggtttaataatgtagaaaccaaaccaggtgtaggttatccaaaacgttgggaagattaagagcactataaaggtggttgggtattaaataaaaaaggtaaacttgagcttaaatcaggtagtaagtggtctaaaattgccttaggtaaaatcttctataatccagatatgccgttaatcaaagattattatgaaccatggacttataattatgaacatttaacaacagctaaagaaggtaaacattcaccagttgcaaaagcacactcattgatttcaggagatagactaaatcttgaatggggaccaaactgggaagatgatttagctggtggacatgtaacaggaccagaagatccaaatattcaaagaattgaagaagacatcaaattccaatttgatgaaacatttatgatgtatttacctcgtctatgcgagcattgcttaaatcctagttgtgttgcttcatgtccttcaggggctatgtataaaagagatgaagatggtattgttttagtcgatcaggatgcatgtcgtgggtggcgctactgtatgacaggttgtccttacaaaaaagtatatttcaactggaaaacaaataaagctgaaaaatgtacattctgcttcccaagaattgaagcaggaatgccaactgtatgttcagaaacgtgtacaggaagaatgagatatttaggcgttttactatatgacgctgatcgtgtacatgaagcggcttcagctgaaaatgaacaagacttatatgaaaaacaacttgatatcttcttaaatccatttgatgaagaagtgattgaacaagcagaaaaagatggtatcagttatgaatggatccaagctgctcaaaattcacctgtttataaattagcaattgaatataaattggcatttccattacatcctgaatttagaacaatgccaatggtatggtactgcccgcctttaagtccaattatgagttattttgaaggtaaaaattcaggtcaaaatcctgatatgattttcccggccatcgaagaaatgcgtttacctattgaatatttagcaaacttatttacagcaggtaaagtagagccagtgaaagaagcgttacaaaaaatggcaatgatgagaagttatatgcgtgctcaagtcacaaacaaaccatttgatacttctagattagaacgtttaggtttatcagaaattcaaacaaaagaaatgtatcgtctattaggtttagctaaatatgaagaccgatttgttgtaccatcttcacataaagaaacctatttagatacgtatcatgctcaaggtagtcaaggatatggcggtgaatatttcggagacaattgtgaaggttgtggtgttccagtaggttcaacgtcaggaaaatctagtcaagaaatttataatgagaatttctatggaggtattttccgtgattaatctaacgcaatttaaatactatcaagaaagttttggatatcttgcacaacaacttaattttccagaaaaattaacctttcatcctaatacatttgaagaaacgattcatccttcacatccaggatatgcagatttaatgaaatatcgtgaaattatgtatcaatttactttatctgaaattaaagcaatttatacggatacatttgatttcaataaaacatcaccactttatatgacttacaataaatttgatactcaaaaagaaagaggtcaaatgctcgcaaaacttaaagtactttatgaaatgtttggattaaaaatggtagataatgaattatctgattatctaccattgatgttgcagtttttacacgtagcaagttggcataatgatcctcgtgcagaaggcaatattgagttagtgattatgattattgaagatggtacatatgaaatggcaaatcaattagctaaggagaataatccttacgcttatgtgattcgtgcattacgagaaacattaaaagcttgtttagacattccaaaagaggtgacacatcatgcttaatcaatttctttggattatttacccatatttatgtgtggcaatttttatcgtcggtcatattgcccgatataaatatgatcagttttcatggactgcaaaatcgagtgagtttttagaaaagaaacaacttaaatggggcagtctgttatttcacttaggaattattccagtattttttggccatgtggtgggattagctattccagcagaatggatagatgggcttggtataagcgaaagtacatatcactttggagctgtttatatcggtagtatttttggtataatgactctaattggaatgttacttttaacagccagacgtttaactattagtaatgtgagaaagttaagttcagcgtctgatattttcgtaaatttcttattaatattgattatatttatgggatgtttctcaacattagttactaatgcagtgataactgactttgattaccgtcaaacgatttctatatggtttagacacttatttacattttcacctaatgcagcactaatgacaggcgttccattatcatttaaaattcatatcttattaggatttacaatattagcttgttggccatttacacgtcttgtacatgtatggagtattccattagcatatacaaatagacgttatattgtatatagaaaacataaagcacctcgtgcacattaaatataaaaggagtacgatatatgattccggaacctttgtttgaaccggtacattttcagcaagagcttgacacacttagaaaaaaagaaaactgtgattttgctggtgttgcactatatgaaaaccacgaaccttctggacctataaaatggcaatatgtttcaggtaatctaaacaatcgttataaattgattgttttgagaaaaggcagaggcttagctgggacagttatgaaaacaggaaagcgaatggttatagaaaatgtttccaaaacaataacgccagaagaaaaaattaagtatcccattttgatgagtgagaatttaaacgcgctcgtcgctataccattatggcatgaacagcatgttgcaggcgtgttattattaggacaaagaggtagtaaaacattgcctaaagtgattagtcaattaaatattaaaggccgtttgtgggaatttaatgaagaaatctaggtgatatatgtgttagagttgtataatctgaaaatggaagatttactaaaaaaatattatgaaactacaaatgaaaaaattgtttttgtaaacaaagaaggaaaagtcattgcaatgaatgacgctgctgaagaaattatttctaaagataataattatagtgcgatgacaaatgcaatttgtgaccgttgtgaagggtattcaaatgaatttgaacttcaaagttgcaaaaattgttatttagacacatctaaaccgaacgatatcaattttcaagtgtttatgaaaacagtagatcataaagttcgaccatttacagcttcttatcaagcgattgatgaagataatgagatatatgcatttacacttcaagatatttcgccgcaaattgaaagacaagaaaaaatgtatcaacgtcagatgatgagaaaaacaatttccgcgcaagaaaatgaaagaaaacgtatttctagagaattacacgatagtgttgtacaagaaatgctaaatattgatgttgaactcagattactgaaatatcaaaaagaatcctcagaacttgtccaacaatcacaacgtattgagggattaatgtctaaattgattgatgatatcagacatctatcagttgaattaagaccctcatctctagatgatttaggcttggaagcggcttttaaatcatattttaaacaatttgaaaataattatggtatgcaaattgtatatcagtctaacattaaagataaaagatatgatagtgaagtagaaacggtggtttaccgtgtggtacaggaagcggtatttaatgcattaaaatacgcaggcgtaagttcggtagatgtctttgttcaggaggttggacgtttattaatggctgaagtgattgatcatggacaaggttttgatccgaattctcaaccacaaggtacaggactagggttgtatggtatgaatgaaagagcagagcttgtaaacggaaaagtaaatgtagaaacacatttaggaaaaggaactattatcactttagaagtgccactctagagagcgtaaagggactgacttataattgaaaatagtaattgcagatgatcatgcagtagtaagaacaggtttttctatgatattaaactttcaagaagatatggaagttgtagctacggcagctgatggagtagaagcgtatcagaaagtgatggaatacaagccggatgtattaattatggatttaagtatgccacctggtgagtctggcttaattgctactagcaaaatttctgaaagttttcctgaaacaaaaatattaattttaacaatgtatgatgatgaagaatatttgtttcatgttttaagaaatggtgctaaaggatacattttaaaaaattcaccagatgaacaactcattttagcagtacgaacagtgtataaaggtgaaacgtacattgatatgaaactaacgacgtcattagtaaatgaatttgtaaatgtttctaatcaagatgaaaaagcaactaatgaccctttcaaaatactttctaaaagagaattagaaatattaccattaattgcaaagggatatggaaataaagaaattgctgaaaaattgtttgtatccgttaaaacagttgaggcacataaaacgcatattatgactaaattaaatttaaaatctaaaccagagcttgtagaatatgcgcttaagaaaaaacttttagatttttaaatatattgaaagacttaaataatgacactcatattatatttcaccagcacatgatattcatgtgttggtttttctttgtctcattatttaaatatagggggattattagagagtataagggaaactccttatgttcatattttcacaaagtgattaaaatttaaatgtaatcaataattaatcacacaaattaactatattgatatgtgatttaattagagataatagaaaattgatgaaggtgaaaaaatgaataaaactaaaggtggttttcaacttacgttacaaactttaagtcttgtagttggattcatggcttggagcattatttctccattgatgccatacatttcacaagatattaaaattaatccaggacagttatcaattattttagcgataccagttatcctaggatcgattcttcgtgtgccatttggttatttaacaaatattattggcgctaaatgggtattcttttgtagttttattatattattatttcctattttcttcttaggacaagcccaatcgcctggtatgttaatggcgtctggattttttttaggagtaggaggagccatcttctctgtaggtgtcacttcagttcctaaatatttctcaaaagacaaagtaggattagcaaatggtatttatggaatggggaacattggtacagcaatttcatcattcttagcacctcctattgcgggtattgtaggatggcaaacaacagtaagaagttatcttattattatcgctatttttgcaatattaatgtttttccttggagatgctaaagaacctaaagttaaagtacctttaggcgctcaagttaaagatttatcttcaaactacaaactatattatttgagtttatggtactttattacatttggtgcttttgtagcatttggtttattcttacctaactatttagttaataatttcggaatagataaagtagatgcaggtattcgatcaggagtatttatcgcattagcaacattcttaagacctgtgggtgggattttaggagataaattcaacgcggttaaagtcttgatgatagattttgttgtgatgattatcggtgcagttattttaggtgtttcaagtcatattgccttatttactataggttgtttaacaattagtatttgtgctggattaggaaatggactcatctttaaacttgtgccatcttattttgctaaagaatctggtactgcaaacggaattgtttctatgatgggagggttaggtggtttcttcccaccacttgttatcacgtatgttacttcattgacaggttcaagtcatttagcatttattttactagctgtatttggaatacttgcttttattacaatgggtcatctttacaaaaaagaatacgcaaaataaatatacaacgtagtgcactagcactacgtttgtttactattttttcaataatctaatgtaaaatgaaagatgaatacaacgtactttgatgagaggttgaaataatagcacaagctgaaactaccctctaaaagagtaaggcaataatacgaagaattataaataagccagtaaatgaatgtctaatcacccatttactagctatttttctgaaagttatatctcaacttcttttatttattctactgtaattgtagtaccttcgtcttcttcagtgacattcttaggtaaaatcaccactaaaacaccatcttcataacttgctttgatttgatttttattaatatcttcgaattcaaagcgtcttaccaattctccgcttgagcgttcacttaattgaacactacctgtttgctcagatacttgtttaatgactttaatcgttaaagtagcatgttcatatttaagatgaatgtcttgtttctttacgccaggtaattcggcttctagaacatattgatttttttgactgtaaacatttgttgggaagcttttagttgaaaattgattaaatacttgttcacctagatcacgaaataaatctcttggattatttttaaaaatagcttgatcaaaaaattctctattattcatatatgaaatctccttttcagagtaatatgtcataaaatatattgaaattttacaatatcattatataaatagagatactacacgtaaagtaaaagcaatttgaaagtttgaagaattaaaaagtgaaagatgtggaataaagaaacatgacaaaagacgtcgatattatgtattagttagaaaataaaagaaagaaggaacaataattacttagcttttgtcatgtgtattaactattcagcattagagccgaagttctctgaaataatatgtcttaagctactagcaaggccatccgcttcatcgtcagaaatatcaaaatcaataaacacttgattagaaatttgctctaatactggtttaatgtctctaccatattgagttaatgaaatttgtaaattacgttcatcttctttttctcgcatgcgttgtacgtaaccttttttctctaatttttttaagagaggcgttaaagttccagaatctaagaagacacgttgaccaagggacttaatgtttattttttcgtcgttttcaatagccataagaaccataaaacttgtgtatgttaaatcatactcttttagatagtgagtatattttttaattacctcttttgaagtaacataaagtaaaaaacataattgtttacttaaataactgtcctttacatacatatttttcccccctcaacttatttaaagatagtatgaacaatagctaatgtcaagactattgtcagagtattatataagttttttaataaatttaaaaataaatttaactaaggctacatataaatttagaatgttgatttatttcaaattctaaattaaattattagtatattttgttacaaaaaagaggtatcactttaaaaaagttattatttcattcataattatttaaatgataaaagaagctattttattgagtaagaggatgaaggagtgctctgatgagtaagaagcaaaagattattagaattattattatattagctatttctcttgtattagctattgcgttcttctttggaacgaaagcgtatcaagggcataaaaatgtacaacttgtagacaattacatagaacaaaaacatttgaaagataaaattaaatcagaaaaaacattatatagtgctaaaagaggcgtctattataaacaagtagtgtttaaagacgagcctaatttaacatatatcattcagccaattggtacacgtaaaggtattttagttgaaggctttgatacggaaaccaagaaaagcattaaaagtgcaaaacataactatttcaaccaaaattataagccatgatatataatcaatatgtagaactagagatattaatagtgattactactcaaaaaaacaatgtctatggaaaaatagatattgtttttttaaatgaaatttttgttaaatggtaaaggtaaacgagttagttaaaaaaggttttagagtaatgtaattcatttatcaaccgctcttactcttacattgagaaggttaaagatagtgattgaattccaacatctatattctaaaaatattctcatttttctgtttttaattaattatttttgccaaattaaatatgtatattatttaatagtttttaatttgttatatccgaattttgaataatttgatataattaagcgatgtcagaagaagggggtttcaacgtgactctgttcaagagaaaagttagcctacctatgcaagtattaattgcattagtgctaggtgtagtaattggtttattattatttggacaaacaggtgttgcaaattatattaaacctttcggtgacgttttcttaaatttaatcaaaatgatcatcatcccaattgtattctgttcacttgctttatctatttcgaatttaggggattcgaaaaaaataggaagctatggatggaaatcaattctttatttcgaaattattacaaccatcgccatcggtttaggtttaattattggtaatatttttaaaccaggaattggattagatcctgataagttacctaaaggcgatattactaaatatcaatcaactgcgtctgccgcagaacaatctacatacggtaaccactttattgatacaatcgtaaatattataccaactaatatttttgaagctttaactaagggtgagttattgccaattattttcttcgcagtattctttggtttgggattagctgcaattggagaaaaggctgaaccagttaaaggtttcttaaacggtacattagaagccgtattttggatgattaataaaattttaaaattagcaccaattggtgtatttgcatttatttgtacaactgttatgacattcggtgcttcagctttaattccattagctaaacttgttttagtagttgtatttgcgatgattttcttcattattgttgttttgggtattgtagcaaggatttgtggaattagtattttctcaatcattaaaatacttaaagatgaattattgcttgctttctctacttcaagttctgaagcagtattaccagtaatgatgagtaaaatggagaaatttggttctccaaaagaagtgacttcttttgttataccaattggatattcgtttaatttagacggatcagccctttatcaatctatcgctgctttatttgttgctcaaatgtatggtattcacttatcattatctgaacaaatcattttaatggtgacattaatggttgcatctaaaggtatggcaggtgtgccaggagtatctatcgtagtgttattaacaacattgggggcaatgggcttaccagctcaaggtcttgcgttaattatcggtgtagatcgtttgttagacatggttcgtacatgtgtgaacgttattggtaatgcattatctacagtagttatctctaaatgggaacatgtctatgataaagaaaaaggtaagaaatatctagaatcaatttaaaaaaggacatctgacatttttagcgtcgcttggataagcgatgcttttttattcaaacaaaaaagcgagataactgatttcaaatgaatgttatctcgctctttacactttctaatatatcaaaaactacatgcctttcatatcatgcatttcatgaattttcatcatgagaccatgtggcacatcatcatgatttacttttgatactctagaaaatgaatcagaacctttttcttttactaaaaagacaaaatcgccttttttcacttttacattagtgttagatggtaatttaacatttttctctactttttcagtttgttcatttaccattttatcaatagtgtgactatctttcatatagccatagtatgattctttttggtgaccatttagcatgacaatggctaaaataatgctaacaattaacataattgcaattaaagcaattcctaaccctaaaccttttttgttcttcattaagactctccttaaatatattaatttatttgtacaaaaaatagaattaaattacaataaaagtttcacaaaaattcaattgtacttcaactaatataaatgaatcattataaataagcaaataagagtagatagaattcatgatacattctatctactcttattaaaaataaaattaaagatcaattgtgattggtgtatcaatatcatcatcattcattaaagtaatcgtttttggatttatttttaacacacataaattaggatcctctttggaatcgaagaatgttttatcttgtgtttcccacaaccaatcaatgactttctgatcttctacaatgtcaatacttgcttctatttcaacaaaactattatttgttgtttcattatatcctagtaaaatatatgcttctggattactttgaatttcttttactttagaacttttattgcttgtttttgtatataaattaagaccatcgttatagaacaccatatatctgctattcggtttattattatatgcagttgataatacgccaattttagaagtatttaaaactttctcaatcgcttgagtcactttttgtttgtccaaactaatcatctccttattttattaatatccctttaaaattaattttaaacagatttgatataaatatatttcacttcatcatgatgcaatgtcatattaaatggatggttgttttcttcttgtataaatagttctgttttaggttgattgcatctatctaattgatgaataatacttttttcgatgtatacaggtaaattatcttgagacattaattgatgaatcgtcccatgttctttatttaatgtatttgcgataattaagctgttttcatttaatttatttagtatttgataatgttgtttactgtcagacaagtagcgatcattaattttattaaataagataaaatgataatttccatctttttgactcattaaataattatttgaaatatggataggcacatcgataaatgctgcaataaattgatacagatgcataattgggagtaaactcccatgtcgattaaataatgcaataaacatcggatcatcttcaaaaaggtgatagcaaataccgcctccatattttaatagtgccgttaaatgacaaactaaatctgctaattgaagtggatgtttaccgtcatttgtatacttaaagcaacgtaatgataagctactatagacaaattgagtcgaaggtatattagaattctttataaaatgaatgtagttttcgaagtgggtatttgcatgagtaaatccgcgttggtgttcaattaatatatttttcgtatcaatattttcaatgtcaacaaaatagtaatcaaaattaagacgcttcattgtatcatagacctcttgtaacttttcatactgatgtaataatccttccactaaaacaccatatttaatcgaacgatttttgtttctaagttttaaatatgatagatggatatcttgaatagtcattgacttggtatcaaatactagcataaatcgtacactttttttattccatttataatcttgattattttctaaaaacgtcataattaaatcgtaaaaagtagtgaactcagatttatttttgataacgacggctaaactgatatttttttcaaataatttttcgaagcagcgattgagtaaggttccgttaattgaatgttgattcatatcactcatatcattaatcaaaatggctggtttaggtaaataagataaatcgatatcataataatcattaaaaacaaactggaataattcgttaatatttttaaaatgaataaatgcctttgaagaacgagtatgttgaagggcttctaattgctcaagatcaatgatagtcgtttcggtagataagtgttcagttgtttcaaattgagagattaattcaaaatacttaggttcaatgtcactcttcaatcgtatcgcagatatatgatcagaatgattcagttgagaacgaaatcgttttggacttaaattaagataatttttaaattgattagtaaaattggtatgactactaaaaccagattgttcagaaatacttgtaatagagtcattcgtacaaatgagtaacctaatagcatgattgattttcaaacttgtataataatctttaaaattaatattcaatatacgtacaaataaatttgaacaatatgactcagaaataagtgcatgtgctgcaatatcttgtagagagatattggaagtaatgtgatcatgaatgaatgtaagtatatttgttaagatatgctgttcaacaggaatctttggaatatatatgaggatgtctaataactgcttctttataaaaagtttgtatgatctttggaatcactttgtcatcatgatgagacgtgttgtacatatgttctatattatttaaaatgattgatttgataaaataacttgattgtaagagatgagcatcaaagtggcaattaaaaaaagcagcgtcttcaagataaaagtaagccattggtattttgagctcaattagatttcttcctttattaatttgatataaatcgccttgattaatgattgcaatatgatttgataattgatgatattttccattgattgtcatttctaattcattagttaaagaaaataatataagaacatgattgatgtttctcctagtcatagaagtaatattttcatgtaaaaaaagagtactgctcataaataagtctcctcatcttgtatagtatttgtgtgtgggatttgggtctgtttgaataataagagttattatatatgaaaataaatgagatattaatagttaaaaataaaaaatttttgtttatttttaactgaaaacgataacaattttatagatgcacaatattattattttttttagaatgtcgcatgagactattggaaatttttagtaggttaatgaaacgaatttaaatgcataataaatatagattttgagtgaagagatataagatatcaaataatgattcacttgaaattaacaatgactaattctgtacatacatcacgatacaacatcatttgaatatgtagcatcaagaatgaatttacttatatatttgatgtaagccccatatatttaaaatcacttttaaaatgtatatcaagaaataacatcttagagcattagcgacagatatacaatagtttaatgaaactaacgattacggtgatttaaatagaaaaaaagaacattactccttagaataagcaacttagaatagaagatgcatacaaatataaaaaggtattaacagtagctaactattatatttagaatcattataactccccaaaaatttctatttaatgtgtaacagttttacatcataacatctaaatatacttttacttaattaaacatcacgaattatattcaaagttaagaatgtcagaattagtattaaaaaaatcctgggataatgaattgtcccaggatttttgatgtattagtaagtaggaattaataggtatgtttattgcgtttataattgccgtgattgtcactttagttttatcacgaagaaaagcttacaaagctgcagcagaataaaaaagtaactcttgcgatatattgcaagggttacttttttattaaagtttttgcttacgccataagaaaatacttacaatagtgactaatatcaaagagattcctacaataaccagccacgaaacgtaactcttatcatcaataggtaatggaacgttcataccaaagaaactaaagacaagtgtaggtagtgttagtaataccgtaaaaagcgttaatgtcttcataatattgttcatttcatttgaaagtaatgaagaatacgatgacgtgatactttctaaaatacctgtgtataattcagttgtttcaatcgcttggttattttcaatgactaagtcttctaataaatcctcatcttcttcaaaacgtttaattgcaggcaaacggaataattttttaataatcgtatcattcccttttaaagctgctaaaaagtaaaccaaacttttttctacttccattaaacgataaagttgtttattcgtaatactatttttcaaatctctttcaatacggattcttgatttatttaaaagacgcaaatttctgttatagtgatttgaaatagtaagtaaaatatctaaagcaaagcgactatgaaattttaaatttacgttatcttgtcttgaataattttcaagaaattcattttcagcatcacaaattgtaaaaatcacaccatttccaatcacaatacctagaggaatggtaacaaatgagagaacatgacgattcgtagaacttacaataggcaagtcgacaataataagagaatagccagtatcttcatcatattcaatacgtgcactttcatctgcatcaagaggatcacgaataaaatcttctggcagattgtactgttcaattaaatgctcaatttcttctctatcaggttcgacaacatttatccatgatgcagattggtttatatttgtttcaactatttcattagtagttgagtgtttatatgcagtcaacataatcgatagttcctttcttagtctttatttcgctgtgtcaatatttaaagttttatattgatgctgaaccatgattcttaaaggtccattataaataattttaaaaatatgattggttaaatcttcaactgaaagacggtggggatcattcacccaaaatttaacagtagatattgttgcaccagcaacataactatgaaaatatttttctggtataccttcaatctcatgatttgtactaatatatttttgcatattttccccgattaaggaataaattttttcttcaagttttgacttcctatttaattgtaagatcgtttgataaaaagtaatattatccgaaatatgttgaagcatattttttaaaataatattaataaaatttttagcagtatcttctggatcttttcccataatattatgaagatgatttaagaatgtcatttgagaaataaattcatcttccatatctgataataataaatatttatcttcataatgtaaataaaaggtacctctattaatatctgcacgatctgcaatatcttgaattgtaattttttctaattccttttcatttaataattcgataaatgaagacttaattgctgacctcgtcttacgaactctccgatcttctttcattctgcatcaatcctttataattaattaacaatattaggcataatgttcattaattaacgatatgatcattattgattattgtattgaagtgataacctcattataatttacaacgtattaaatattcaacacattgttcaataaatatagggaggtaagtaaaaatgaatattttttaaaagtaaattactatggttagcaccaattgcagctattttattattagtgatattctctttagtgttttatcctgcattcaatccaaaaccaaaacaaatacagattgcagtggtaaataatgacaaaggtatagatattcaaggtaataaagtgaatattggtaaaacaattgaagataaattaatggatagtgattctgatattgttaaatggattaaagtagataaagaatcagatattaaaaaagggcttaatgatcatgaatattacggcgcagctatttttaataaaaatttttcaaaaaatgcaatgagtaaaacgcagttgattatttgaaaaaaggtgtattatattatttagatatctaactaaatgagataggcacaaatagaatataattattaatattgagttagtgtgttagcatatgaaacgaaacattatcctagtactatttatattaaatgcgttgtttggtttaacaggggttgtatggtcattattaatcgctgaaacactttgttcactgttagcaatgtttattgtatatgtttaaaacacaagttaactgtggacactcaagtgttagtagaagaataaaataatttgatattaaagcgagctataagggaggagatctcttatttagctcgctttaaatttatataaacgatgacatatgataataattattgttaaataagttatattactttattattgttaaatgagtattttttataggaggacgtcaatggtcattttaaagcgaagttctaaagtagctatagcgttattgatgatgttcctatttttattcgtgccgagtatgacaaaaatagcttctgcgcatgctactttagaaaaaacaaccccagcacaaaacggtatcgtatcaaaacaaccagatacaatcgaattaacatttaatgagccagtaaatgccgaatattcagggataacgatatataatgataaaggaaagaaagttgctgatgttaaaccgagtacaataggacattcagatactttatctttctcaggcaagcaattaaaagaaggtacacaacaaattaaatggcatactgtatctgctgatggtcatgaaattagtgatcaatttgaattttcagttggtaaaaaaacagccaatggtgtagatactactcctgttgcatatgaaacgcctgcattttggtttggtgtgtttagatatatcgctgaaggcgcaacaattattttagttggtttatattggttaaacggtattgcacgtagaaataatttatcaacatttgatattttccctagacatgtcgctgtatcattgatcatgatgatggcatatattatgtcacttgtactttatctgatgactctatcatctgatattttggattcagttttaacatttaatccaagtgtcttaattcaattcccatatatactgagcgctgttgctttaattattttaagtggattatttgtattaagaaatatggaacgaacatggtattgggctatttcgataattatgattttagctttaagtatgtcaggacatgcttggtctcaaagtgcacctgtttggtcaattatacttagaacattacacttagctggtatcagtttatggctaggcgcattaatttatttgttttcttcagtatttactaaaaaacgagatgcagttgatttattgcgagaaatcttatttaaagtgaatggagctgctgttgcagttatcattattactggtatattaatgtcgattgatgaaactaaaattttatcaatatggtctaatatgcaaacgtggacaatattattaataattaaaatcgtaggaacattaatgatgatggctttaggctttatgcaaacaacgcgcgccttaaacaaacgttatagaattaataaagtctctttaatcgtagaagtttctattggtattattttaatacttgttggtgttattatgagtcaaattaatattccataaaaggagattgtaaaatatgtttaaaaaattatttgcttcaggtttagtgttcttcttttcactaggtttatttaaatatgctgatgcacatgtaacgataaatccaaaagcagttgaacctggatcttatgaaaaagtggatgttcgagtacctgttgaacaaaaagatcatactgaaaaagtcgaattagatattccaaaagaagtacaagtgtcaaatattcaatccgtagaagggtataaatatagtttagataaagacaaaaaaggtaatatcacaaaaatcacctggaaagcgaaagataaaggcattggtcctaatgaatttgtcgaattcccacttcttgtagaaagtcctaaagaagaaggcacatattcatttaaagctgtgcagacatacgataataaagataaggtaaaatggacgggtaaagcgaatagtgaacatcctgctccaacattggaagtggaaaaaaatgcaaatgctgtaactgttaaagaagacaacgctaaaaaagatgaaagaagtcaatcatcttcaggtggttctatcgcattgtggattatttcacttgttgccattattttatctttagttgcattatttaaacatgcaagaaataaataagacatataataaagtgatttctagtgcttgctagaggtcattttttcgtaacatgatttgattacaaaattttgtcactttaaagacgaagataatcgattataataattgaagtaagggaggattttttatgcgcagattattatacgcttttttagtctatatgattattggacttgtaagtggattttactacagagaattaacgaaagcacatgattttacgggcgatacgcaactagcgcttgttcacacacatacattaatattaggtatgtttatgtttttacttttacttccgcttgaaaaagtatttaagttaagtagtttttatttatttaattggttcttcattgtatacaatgttggtgtcattattactgtaggaatgatgctaacaaaaggcacttaccaagtcactggaaaaagtttttcaccagaagcatttgctggatttgcaggtatcggtcatacaggaatgcttgctggcttattattacttttctttttactaagacaagccattttaaaagaaccgagagattaaaataataatttgagacacaatagattcaaacctattgtgtctttttttataattaagaataaagagactaaaagaggaggacgttttaatgattcattattcaaatcatccaccaaatgttaaagattattgtgaattaagagcaaaagcaggtatgagttctaaatcagaaacagcagcaaaaaaaggattaccccatgcatgctttaatattactatttatgaagaatcaacattgattgggatgggtagagtgattggagatggaggaactgcatttcagattatagatattgctgtccatccatattatcaaggacaaggttttgggaaagaaatcttaaaacaagtgatgtcatttattgaaaatcatgcagaaaaagggacatatgtcagtctgattgcagattatccagctgatcaattatataagaagtttggatttcaatctaccgaaccaaaatctggtggaatgtttaaaaaatattaaagaaaatagatgagattaaattaaatttcttttaagttctttattttatgtctagattacgctttacgtaaatattctaaataaaaatctctaggtgatggcttctagattaaaaaatataagtgaatttttaatttttaataagctaaataaattctgaaacaattatttgaagtgcatctagtatataagttaaatatattatttaataaaatattcataaaataatatacacatataaaatgaatgatgataatatataaatgaacaaatacacctattgttcagtacaatatagtaaatgattgtgaaacattgagttataatatagtttttaaataaaaatgtttcatcatttacacctatacagctaagaataaacatcaagaataggagtgaataatcactgtgaattatcgagaaaaattacagaagtttagtatccgcaaatatacagtcggtgctttttcaactgttattgcgacattaattttcttaggttcacctcaagcacacgccagtgaacaactacaaaaagatggacaagtgattcaagcaaaagctagagaccaagaacaaacttcaaatgagacaagtaacaagcaagttcaatctaacacagaacctaaagcttcacctgtatctgagagtcaaaaaggaaacaatgaaactttaaataaagttcagactactgatacattaacaaatgatttaacatcattttcatctcaaaacgaaaataaagatacatctcatacaacaacagatttaaaagccaacaatgaagttcaacctcaaaaaaataaattagatgacataagtctagtcgaggtgaatgaaggacataatcatgacaaccgtaatcgtactcgttacgaagatagagaagcatcagatgatactctagtatcttcgacttcaacaacaattgatggtgataaacttcaagcagcgtatgaccattcttacgaggaatatcgaaaaattgatagagaacaagctgacactacaaaagttgctcaaattaaagcgacgttcaataaagttaatcatttctttagtgaaaataataattcaaatcaaacattaattaatgaattgtataaggaactagagcaagctaatgcattaattgaatcactgccacaacgacaagtaagaactattagtacaagagcaaatagagaagcacgtgctgtaagatcaagtagacgtcctgtacgtggacaaggtgggacgagaccccctagcaatactgctaatacttatacaccaccagtagttcataactctagaccaaaacctggctcaaaagtaaaaaagaattcagatttgtataataatgctaaaaaagaatggtatgtagaaaatgaaaatgatggttccggttattggtcaggaacgtttttacatgcaacgaataaaagtgcaccatattacgctacacgttctcattatcgaaatatgagtccatctagtgttagaggtattgcagaaatttcatcaattagacaaaatgatggttatttatggacgattaattttaataagtatcatattaaacgtaatggcatggtattttggtttggtttacctaaaggtcaaacgccaacgggaccagtacgttttactaccacagatgtaaatggtcatgaaacatcatcatctggtactggagacggtagagatcaagcattatcaagaatgtgggattctgctggtggtattacttctagtgcatataatttcagacaaggaaatcctttgaatagaagtgagttctataacgattcagttaatcatatttataatttaggggattttgcacgtggtaatgaaaatcaaccatttacattctttgaaagagaaggtgttccaaataaaattaaagtagctggagacgatatttatcgttatttaactgcgcaagtaaatcataatcaaggtattgatcatatctatgcatttcaagctagaggaacagatagttatatcattcaatttaaaacgtctggtagctcacaagatagattatattatgcagcaggtggtagagggattgaatttaatgaaatcaacaactataaccaattatatttagagccgctagaacagtataatgatcgtaaaactaaaattgtagatgttatcgatcgcgtactgcatattgaccatgttgaatcagcttatgatgtgccagagcgtagaataatgaaaaaacattacttagatggcgatttcgctacacacgaatatgctgaagatgttgcaagttatctaagtaaccctagtgatcatgtaatgggtttattccctagagtgcctactgatcgttatagaggtaattttggtgtaaatccgcttaactcttatgaaattcatgaaatgttttctgaagaaaaattaaaagaggctgcgagaacaggaagaccaattgaaatttttgttgggtttaatgtaagtgatgcatatcataatggtgaaacaatcaaaaaagtaaatttatttgtcaaaccaaagttagaacaatccattggattctattcagataatgcaaccgataataaagaaaattcacctgaatcacaagctgcacatcatgctgtctttttacaacaagaaggtcaaatgcttaatacagtgactaatggtaataataaggactatcatcaaaatattcgaattcaatttaaaagtaacgagtctgcaaatgtatgggaaatctctggatatccaccatctctacaaattgaagatgcagtagatagacccaatacagaacttgagaaaaataaagtattggttggtcaattaccgccaggacgccatgtgatgacagcgagaatcggtaatgaaactaaaatctttgaagtcattgccaaacccaatccaccagttatttcaacacttgcagcgcaattaggacaaaaaggaggtaagaaaccaactattacagtgacacatgtgccacaagatgagagagcaaaagtacgtttagtttcaggtggtatagacggtgcaggtcctggcacagcaccttcaggctatactgtactcgcggaaaagatggcaaacttagatggcacggtgacatttgaagaaagtgattatactaatcctttacctaataatggggttattagagcaattacatactatgaagattcagtacaatccaactttagtaattcgattaatgtaggattagatactacaccgccaacatttagcaacgtaagaggtcttcaagataaatactatcgtggagataacgctaatatttcaattcctgtttctgataatgcatatggctcaggtgtggaagatgcatctatcactggaaatagtggtttacaagcggtattcaatagagatgcttctggagacgcaggtactttagtgattacaggaacaatttcgaatgatgtaacgtggaatagtgatatacttgttcaacccgttgctcatgatagagcaggcaatactaccaatgtaagcccatatcatcttcatattggaaagttatcagatgataaaccagttcagttatttagccagcaagaattgaaaacagtgggtaatcctaatagtatttcgcaaagcgaaagaaatgatatcattaactcgcttaaagctaaaaatagtagtttgacatcatttttaagtacacttaacccgtatatggttggtaatgatggtagagtagtcttgacatttaaagatggttcgactcgtatcattgatccgactcaagtgattacatatagaccacaacgtaaatcaatatatactgaaccaggtagttcaaatacaaaagaagcatttattacaattgctaaaggtcaagagtatacaattggacctgatttaagaaaatatttctcattaagtaatggacaagatattcctaataatgcgtttacaactattaatggtagttcaataccatcacctcaagcaataagtcgtctaaatgctggtgtttatacttataacgtagatgcattaaatgcttacaaccatagttcagaacgtttgacaattaaagttaacgtagttgatgtcaatacattagcagaaaatcaacgtgtttatcgttcaacaactaaaaatttaagtaatgatgaaattacacaagttaaaaatgcctttaaagatgctaatccacaattaaatctaaatgatagtgatatcagaattgaaaacgatgaacctttaagtaatcatccaagtcgtgtaagagtgacgattactaaaggtgaattaacaaaacaattcatttcaacatttgatcatatggatttcttaaaatggataaatttacgtaatgattatactgtgacttggacaagtcaaaaacttaatggaagaagcacagatggtggatttgagtggtctccagatggtaaaacaataatttatcgttatgatgcaacgattggaagaagaataacaggcaatgacgtattatcacttttaagagcaacgcctaaacatgcagggttgagaaaccatatagaaggtcaagagaaaatattagcagaatcaggctcagctcgtggatttaaacctgtaggatattctaaagggaatagtatatattcggatggagaacatccatttacatatgatggtcaacctattcaagtactagacatagttgacagcaatactggatatagcaactctgccgttgcacgcagtgactatagacatacaagcagcaattcaacagtgatgagtggtgatattccagccatgaatggcgctgctggtttccatttagataaagtgcttaaacaaaatggtactgataatggaattatgggtgcggtagataaacaacaattgtatttaacgccttatggtgcaaaaagctatattgaacgccttggacaatcaatgtcatcaacagacaatgtgattaatatcgtatttgtaccaactgataaagtaacgccaaatattgtattagataattataatgatcatgttgtattttcaggagaaactttcagaaatacacttacattaactgataactttggtattaaaaatgttactgtacctaatgacagtcaaatacctatgaatgtattaaaccattcaacattaagtggtgttgcccctaatgtatctaccccaatgtctaaacaagtgaaagttaaagtaacagatggtagtgataacgaaacaacggctgtatttaatgtattaatcaaaccattaaaagataaatatagtgtcatgacaactgctgatgagtcacatccaatacgtatagcaaatattagtaacaatgcaagtttatctgagacagatagacaagctatttttaacagtttagatatttcgaaatcaattaccaatagaaattacgttacagagggcagtaatgaaataagaagtagggaaattagtaatgttcatcgttcaggtaataatgcaaatgttgaagtgactatcacttatgcagataattcaagaacatccattactgtaccagtaaaacatgtcattcctaatatcagaggaatagaattatttacagtacaaggtcagccattcccaagtggtaaaggaacaaataataatgacttcttcgttataaacaatgatcaacctttgacagatgctactgtgacttggattggtaatggaccagatattaactctacaacagtaggtgtcccacaaattttaagagcaaacatcttatttgatggtgaaacaacacccattgaaacagaagcacactatagagtagttaaagcgaaaccaaaaagagtatatcaaacaacaataaatggtaatttcttatctgcaaatgaaggctcgtcatctaatgtaggagcatttgtagaaggtattgcaaattatttaccatcgggtacgaacttcgattgggcacctggttctggacaacctttatcaaatagtccaggtatttttacagaaacaattaacgtgatatatcctaacggtcaagtagacccagttaatgtattgtttaaagtgaaaccaactacgccttcaatcgacactataagtacaaaatataaagctgatttatctggacaatctattaaagtaaataatgttccaaataatgcacatgttaaactatatactgaagatggtagagaaattagtaatacaactatgactagaaatcgtgatggttcagtatctattacaattccaggagtattaccacttggtaatattaaagctaaatcaattatcacggttgatcatttaaccattactgaacaaaataatagtgattctgttgtgaattcaacacgttcagaatcaatagaatcagatttaagtgcatcttcgcctgtaacaaaacagcttgaagcggtagacggcggattaaaatttgttaaaggggacaacattgatttaaataatcctagaacttacattaactctaattcagatatcatacgagtagaatgggaacagaatgctaatcaatggaaaaacacaattggtactacaactaaacgcgccattgtcacattgagtaatggagaaacgagaacagtttctattccagtaaccatttatgcaccagccactgctaaagcaccacaacgtgatgtggtcggtcacgcgttaacttatggcgatgacgcagcaaattatgtgacatttgaaaataattatatgaatggggctacagtgacttggaaaaataataatgctccaaataataatattgctggcgttcaaagcttaactgctgaagtaaggtataacggtattaatcacgtatataatgtcccagtaaaagtatatgaatataaatataaatttaaaaaatcagagtatagtacgattgtaggaacaagttttgaaggaaatggaaatattaataattatgtcgtattagaaaatgcgaatggtttacctacagatggtttccattttgtttggactcaaaacaccacagcttctcatagcgaacaatggtcaaatttagcatatccaaatcaagcttttaaaaaagaagcgagatttgaagtattagataaccaaaaccatgtattctttacttctgatccagcaatatttaaagtgacaaatgcagttccaaatccagcaactgttacacaaaatgatgttggcgatgtagtcatttcaccaggagtaggtaaaaatttaggagctaatgttggaaatataattgtaaatccagatagaattactgttaaaaaaggaaatcaagttattggcacatttatcaaaaataacacaggcaaatggacaaaagcgagtgattctataaacacgcctggtttatcagtttctccagatggcagtgaaattatttatgacaaaatgtcagttccaaatgatacattgattaacatcgaatcaacgacaggtaatggagaattgacaagtgaagctgctacaagtgcaacttataaagttaagccagcaacaccatctaacacaacatttgcatttaaacaaaatggtgagttcgaagttattccaaacaatgctaatgcatcaacaacaaaaaatcctacagataaagttaaaattagctatgtcgaaaaaatgggtaatagtacagaacaatctagagaattaattgtaactaaaaataatcaaaatcaatggtcgatgaataatcagctagattatgtaacacttgattctagaacaggtaaagtgacatttaaagctaattctttaaaaccacatgtactgattaatacagaatctattgctggaaatgatgataattttagccataatactgttggagttgtgggacctgatcatcatgatgttgtaattcatgagatagtcaaagaacctggcgaaagagttagtaatgaggaacttaataatgcaattagtgtagataataaagatcatgctaatgtaaacgaaggagtaagtttacctacaaatttacagagtgatacaacgcaagcagtaccaacacgtattacttatagagatggaagtatagagattgtaaatgtaccaattagaacccatgcagataaatcgagtattagaaatgctttacctaaacttaacgcacaaggagacactaatggtaaaacaccattaagtgtgactgcatataataatgaaatgcagcatttgcatgatgaaattgaagcagttcgaagaaaagctaatgaagtgttatcaaatgatagagcaacaaatacggatgttgtaaatgcgacaaatagtattaatgatatctcagtgaaaattcaacatgcaatttccttactacaaaataaagcggataatagtgctttagttgaagcaaaacgtcaacttgatgtagcaacagcagaacaagatccaacgtcaggaatgacacaagtaacatcagataattatagagcgaagaaagcagaagcagagcgaattagttcagaagctcaaggtgtgattaacaacggagatgcgacagctgaagaaatcagtgatgagaaagcaaaagtagaaaaagtattaacagcattaaatcaagcgaaagatgatttaagagcagataaaacagaattacaacataaacttccagaattagatcaacgtggcattaccgaaggttaaacaacataatttttatgaaacgttgatatataagcgtttatagactatttttgatttgtttatacataaaaaagggcagaataagggcatgatgtgaaaaaacttgattttaagcataaaaaaatacgctcaaaatttgaacgtatctaatttatattttccaacttactcatcatatctttatccatttgttcagtaacatgactatatatctgtaaagttgttttataatctttatggcctacacgatccattattgcacgcagtgacacgcctaattgtgataataaggatatgtgactgtgacgcatagtgtgagttgaaatatctttttcaatacctacattctttgcagcgttcttaatgttagcattgatagatgataaaggcataggactgcctttactatttgtaaatataaaatttctctctttaaaattactatcccacttagccgatttcttattttccaacattaccttacgcaatatctcacaacttctagtggtaatagatatagtacgataagaggactcagtcttagttgtatctttaaagccacgtacaccatctttagttatccatgctattgtgccatcaatctcaatctttttattcttaaaatcaatgttttcaggttggagtgctaacaactcaccaattcttaaaccgttcaatacttgaaactcagtgatgtatgcagtcatcatatatgagcgtttaatatagcctttattactagtgcttgccttatggttaagttcatcaatgagtttatgtacttcattcatttctagataattctcacgttttgctttgatttcttctctagttactgctttcttaggtaatgacacattatctatatatgatatatctgagatattgtactttttctgagcaaacttcaatacactctttataaggctcacattgactttaattgtaatgtgtttaatattattttctttcattgatgtatttatgtaatcttgaataacttgagcattcattttatcgacaagaatatcctcatttattcgctctttgatgtgagcaagtctgtaagtttttgctcttatagttgattgtttagcaccagatgttaatttgtaattctcaaaccactcatcacatgcagcatggaaagttagcgtcttgagtgtagtaggtgtcttattatttaacttttcttctatacgctcatttaaacgtttctgagcctctttctgtgactgcttaccattcttattaagcaccacgctaacacgtcgccatttgtttgtgagtggatctttatacttctcataatagcgatatttagtttcaccatgtttattagtaaatttctcatgccacatataatcacttccttttgtaataaaaaaagccagatgacgtatcatctgacttttcagcataaagctgagaatatgtcacctctttaatagaggtgatgccggagtggttaccgggaatttataaacaaatgataccatcttattaattctttatcaaacttttttatagaaacttgagtttaatttctttttgtattttatctatatcacgttgaggcaaagaaatttttccagtaggatcggaattatttattttgcttaaacgctttttactaatagtagaaatggctgaaacattagcataagtatctttgcctatatgttttgaatatactttaatagcagcatttagctctgataacttatttgagatttttttcttttgtttctcttcttccttattaaatttgtcagaatcagtttcaaaatttatctttaaatcgctatatttttctatgcaatttgcaaattgctccaataaatctgctgcagttaaatctaatatagtggttgataattttaagtaattagagttctttttagatgaaagtgggacaattgtaatagtttcttttcctctattatcataattgtcaataacaacacaaaagtggttgccagaaaattcacttcctatattactacctaatctagcatatacaatagcacctttcttataagccttgtaataccttttatgagtactattcacctcagaatgtaacgaattcgaataaaactctaaccaatgaggcatatacattatttttagattattgctattagaattagaatagctttgctttaatttattatttgagttgtttaatttgctatttgcttgatttatattttttgacatttattttctctctttcttattttgttgtgcatatttaagtgtgccccctaaataaaaagggtagacgtgctaccctaaatttttattgctgttattgattatccatttcattattcattacatcagatacacgatcattaaattcatattgtgaaatttggccactatctttttgttctactaaatcattcacttgttcttgtccagattcagacatccaatctgtttgaaaatcagtggcaggtaatgaatttaaatcaacatgattattttgtgaggcttgttgttgctcatcattccactcattttgatcgtttatccattgttcatgtgctctttgttcagcaggagttctataaacaccattatggtcataatcatatctttgttcattttgctgattgttattagcttgttgtgtttgctgctgctcttgagttgcagtttcttgtgtttgttgttgagattgaacttgttcatttgttgcagtttcttgtgtgtcttgttcttcagtagagttatcttcttgtgtagatttgttatcttcattttcttgagatttcttttcttttttagactttttatcttctttagtgttcttatcttttttatcgtcagctttcttttcagtagtactttctgattttttattttcatcttccttagtgtcgtcttgaccacaagcacttaacacaagtgtagctgcaaataatgttcctagtaattttttcatatgtatgctcctttaatttaaataagggtaaataactatcctaaataagttattgttgcattgctgattcttgtacttctttttgtctattagcccaactttcataactttcatttttaccaacccatccaggtcctccaacatgagcattaggatcgtttgctactttttcacttgcttctttagcagcttcataatcgccacgaccataacccatttgagattcatcatgagttgtaggtggtatctcttgagtatttgaaggttgattatttacttgttgattattattttgtgttgattggccagtttgtgaattgttgttagcactagctactttattttgagcattatttgttgattgactattattatttgaattgctaattgaactagaatcatttgatgtaacactttctaaagattgttcattagaatcatgtgaatcgctagttgttttattttcttttgttttactttcttcagaattgttgtcatctgttttagcactagctacatcttttgaattattatcttctgatgcatcatcttttttactgttatctgttaaatcttctgacactgaataatcttcagattttaagtcatctaacttaattgttttagtacctaattttttaccatcagcaccttttgtagcttttaaaactacatctttatcattttgtaatttgtaagtcatgataccttttgcagttttaccttttttaatagtgtcgttactatgttcattccatttaccgagttttccagtagtaggtgtaattccgacatctaatttatttacagtattatcactatcttgagttgcttcaaaacaagctatccatacattcattgaagttatatcttcgctatccgatttgtttttaacatgatacttgaaagctaataatttatcgccagaatctttgtcattaagaataaaagtatcatcaatttttaatactgcttgatcaataactagagtatcatttgcaaattgtgttttattttcatttactgattttgtttcagtattattagactttttatcttctgaattactatcattatttccacaagcgcccaatactaatgtacttgctaataatatgccacataattttttcattttatatgtaactccctaattttattaccttttatattcacttttctatggtgtattagacattgttcgatagaaccaccaccttttaaatgactaaaaatttagtattaaaactactttaaatatcttctttataaaaatcattagaaatttttattacattttcttctactgcaacaaaatctttagttttatatcctaaagaattcatagtaattaacttttcaatttcaaattctcttaacttttttagagttagacctgtagtttgtacagtataaacataaggtaaaaaattaaatctaatctttttgtctaaccaatcatttttatcaaaataattataattttcttcaatagcaatttttagaattattttaataaaaaaagaatagagattagcaaagaatgatgtggatgtaggttcattttcaaaagtagggattttctttttactagttaatacgtctttaggaaaatctccagctaataagacttcaataaaattttcgaagtattttaaagttagtaatattcttttttcgaattttaactcatctaaataagtacagactaaaaacgtttcattgttattaatatcgtttgtataaggtgacaaaatatcttcttgaaaaatttctatttttttaagttctaatgtcgtgtagtaatcttctatagttattagatccactatttgacaatctaaagcatttattaacttttcaagagtatcaaattgaatacctttacttttaccagtagataataaactcaaagtattaatagataagttagttttagtagacagttcttttaatgtcatctttttatttttcattactttttttaaattaaatttaatcactttttttcctccattataattaaaatttatcatatgtttgtaaaagtaacaaacaatttttgtgaatattgttgacaaatataaaaaaagaggttatcttttaatcaagttactaatgtattggtaactatttacaaatataattgtaaagaaggtgattagatgaaaataagaactttagataagaaattaaaaattactctattaaaagaaggttatacattaactaagtttgcaagtttaatagatattgatacttcatatttatctttaattgtaaatggaaaacggactattagtcctacattagctagaaaaattgttaataatttagagacaaattttgaagatatatttgaaattatagaaaaagaggaggtttaagacatgccacatgttaagttgcaagatttaccaactaaacaaaatacggcacttgaagaaaaacaaattgtgttcccagtcaaatacgcaaagcctaaattattaagtgaattatttaactgtagttattcaacaattcgtagattactcatttcatatgatgaggataatttaggcgtagagagtatgtattttgatattagtagcacactcacacttgtgaatgtagaaaaattcgaagagtttttaaaatgtaaacacaaaaaatatttataagaaattggaggtagtaagcatgtgggaattcatagtcaaactaatatttatttcagtaatttcattcataagtggctggttactaggaatacatgtagctttcactatttacatgttaggtagtgtgattgcagcgttaaatattgaagaagatggaggagtagtaaatgaacaatgatattgaagtaataaaaagtatatatgaaattcttgatagtgcagtgaatgatacacgtacagaatataatcacatagttgaaggaggaaatcaaaaatggaaagaaactcttaatcgtgaacaacaattacaattcatatgtgagttggttatgcagcaaatagaaaacaattttgagtgggaggaataaaaatgaatttagaaattaaaaatatattgaatgatatagaaataattaaagaaaaaattgatgacgttgtgacttcttttgtgtggtttaatgatgagtatttcactcatgatcctagctatatgttaaataaaaaagatattttagaacatggttggagatatcacgaacatagaataaagaattcacaaacaattgatttaatgctgatgtatcaaaaagatttcggtgaacttattgaaaggtttaaaaaaatggaaaaaacgttacctgataacaatagtttggcgactaaatcagataacgcttaaattaaataaattataaatttcaagagcaataagaaaatactccatttgtattataacatctttgctcttgttttaatacattggaggcataaaattgagcgtaattcaattagaaaatgatactcaagtgagtgtggtgtggtatggaaacgaaaaatcaacttcattcaaaaacttctctcaacctaagtggagtgaattaattagtcgtttatctattccacaaaataatacaaataaatatgctagaggaacagcagtatatggagatattgctgatggcgtagatgataaaggcaacgaatatcaaaaatacagaaatgatggcaatgtactttatagagatgtacttgtacttgattatgatgatgaagatgatttaaacatgctacacaagtcaattaaaagcgaattagagggttttgcatggttttggcatacaacattcagacacacaaataacagtcctagaatacgcttgtatgtgccattgagtgagcgtataagtgcaaatgaatatcgtgcatatgtaagaacactagcacaaaaaatagcgtgcaaaattgatgaaggaagttatcaaccatctagagcaatggcgttaccagttagaaaaaataatgaatgtccgtttgaatttcaatataatgacgctgcaattttagataaatcaacacttaaaaagtgggctaaattatttgatatttctactcaatcaaaatttactccagtctttaaaagacgtgacgcaagttattgggaagaaaaagcatttggcgttagtgaaggtggacgtaattcatcactagcaagtattttaggtcacttatttcaacgtagagtaaatgaacacataatttattctttcgctcagatgtgggggcaatcatgcacaccaccaatgaatgatcgtgagataaacgctactttttattcaattatgaaaaaacactataacaactagagaggagttttctatgaattttactaatgatgaaattatgaatgaaattaaggagaatatgaataaaaagacatatactcccaattttattccagatggttacaaagtgaaacctaatagttatggtgcagcactttatcaaattatcccaagtagaaaagatggtgaaccagataaagaaatgtttatcactactactattccagaaattaatactagatatgaaaatattgaaaatggtgaagtgagttataacatgcacttttttgataatagaacaccagtaaatttaaatgttactgccgaagaaataactgataatagacaactccttaaactagcaaataggaaactagatgtaacttcaaatacttcatcaaaattagttgattatatcaatcaatctaagagatatagtccacctttcaatataaaggtagcaactcgattaggtcatgtaaaagattactttatttatccttataaagatgaaatggaacataaaaatatcaagttttttaataacgataaaggctttcaaaaactagtaaattcatttaaatctaaaggtacaatcgaagattactcaaaaaaagtatttataaaaattaaagatttacctatggttatggtgatgttatatgcctcactaggttcggtattactttatgaatttgatattatgccattcattgttgaacttgctggaagtacttcaacaggtaaaacattcactttaaatttagtagctagtgtgtggggaactactgaccttacaactacatggagttctactagaaatagtattgaggctatggctgcatttttgaactcttttccaatgtttaaagatgatacacgtaatatatcacctaattttatagctaatgcagtctacaactattcaagtggtgaaagtaaaagccgaagtaataaaaatttaactattgatgaaaagaaagaatggaaaaatatcatgctttctactggtgaggcctcaattacgaatatggcagaagataaagctggtgtatcggctcgtgttgttacgttagaagaacaaccttatccagataattttgatttcatctcattagatcatgaatttagagaaaattacggaacgttaggaattgaatttattaaacaatatcaatcaaaaaaagatgaatacaaagaaagttttgaaagctatttaagatactttaatgaaaaaggtatcaatggagtaatgcaacgtattgggaagtgctttgccttattacagcttactggtgaaattcttaatgatattgatggctttgaacatgattactataagattattaaccaagcatatgaaaatatgttgaagaataataaaacgatagataaacctaaacaagtgcttgaggatatgttgcaatatttagatgctaatcgaaataacatcactggtgatggatatagtccagttaaaaatggcgaagttaaagcaatatataaattgggttacttatgtattttaggcgatacagtcaaagatatattaggtcatgaaatgcaaactataacaaaacaatgggataaaaaaagttatttagttaagaaagaaaaagatcgtttacaaatacaagttagacatgagactaaaaaacatagaggttttgctattaaagatgaagtcataaaagaaatgggatttgatttttcaaattctcacaatccacattcagaattttaaaaagtaccacatgtacccgttgagtacccacttagaaataaaaaacaggtactcgataaacattgtaatatcaaggtttgaaaaagatagtacccgaagtacccactaattaataatagtgtatataattttaagaaatttagattttataactaattaatactcactatttaaatgtacatgctaaaagtattttaacgggtacaacgggtactaataaccttaaatccttgtctatcaacgatttcaagagtacccacttaacaatgaacgacgggtacacattgggtactagtaccacatttaattaacatggaggtcaagtatgccaacaattacagaaataggacaccaacaatttaagatgtttataaataataataaatttcagcagcatgtgaagaaggaacaagaaaacatggctaaaggtttgattattagccttttaactaattctactaaaactcataaaatctttattcaagaagtaattttgttaaataagaaatattatctctattgttttggtggggatatatcattgataactaaagatttcaaagcactcataaagtttaatattagaaagcctaatccattacttaaacaatattttaagagtgattggatcattgaaatagataatttaaattcacttaaaaaaggacatggcaaaatgctattaaaagatgtattggcaatttctacaaagctcaatcttgagtcttgcttatggactgaaagcgataataatacaaaatattttgaaagacataattttaaaagtatcggtaaagttggaaaagataacgaaaatttgatgattaaaagaaaggaacgtgtatagtatgaataataaacaattaaaagaattaactaagattgctcattttatggaaagtgtaatttatgaaacagataattgcgtaagagattttaatatacttacgcagcaacaagtgaataagacaacatttttagagttcgcactcatgttctttgagcgtaaaacgtgggaaattattgaaatgttagagtttgatactaatgaatttatcttattgaatgaagtgaacgaaacattagatagtgtaatgaaagaaacagaaagcgtatatcattatagcgtgaccgatgagaatggtgaacattatcatactactgatagaaaaggtcatatcattggaatattagagtgggcattagatcaaattgttgggaatatagatattgagcaaacaatttaatatataaatttataggtcatgtactttaacaggtgcatggcttttttatatgtaaatcgtaattgttaagatttgttaatgattttagattgagttaaggtaataaacgaacattagttcctatttagaaagcctatgaattagtgtgaaaatactaataaacattgatttaataacgttaataagaatgttaagtagttgtttaattattacaaaaacagaacgtttgtttgtaattttggtgtaaatttagtataatagtgttatagaagtaattatacttttatataatttgattagttttcttgttctctgaaactacgaatacaatagttgaaaaatgcaaattcactagattttcatttattacctcctcatttaattaggtctgctcaaattaactaaaaaatgaggtattaaataatgacaataacaattgaaaaagaattaactcaagatcatattaaagtattaaatgtattacgcaacactaagcacaatattattactaaacaaaacatattcaatcaattgaatatggagtttactaaaaacaatgaaagatggttacaacatactattaatagtttagttgtagattatggctatccaatcggatatagctataagaaagatactagaggctatttctggataaagtcgaaagaacaaaaggaattggccttactaagtattaagcgtcatattgagggcagtatgaaacgatatgaggcactaaagaaaactgagatttaaggtgatgtagtgagtgcagcgattgaaattattcaagagaaagttagcgattacgaattgttcactagatttaatacttactacattcaattaagaatagcactcatagaaagtgatatagaagatatgtatgaccgaactacacctagtttatgtagtgatactgtatcagaaagtatttactatgagagttattccgttgaaaatctagcaatcgctatattagaagaacgtcagaaattggaacggtataagagtagaagtcaaagagatttaaacgccttttatactgttctagggcgtttctctactaaagaacaaaagtatattaaaaactatattaatacacgctcagaggctcatatgaatgtgatagagcgttttaagattgaactatacaaatatattcaaacaaatagaaatgaacgtaataaaggtatagaaaacaattattcatatataaatgacaagcgtcaaaaagtaaagacttatcctcataagttgacgcttaaccaagagaaagcactcagagtactgaaaagaacatgaataatgatgagtttgtagcaaagttgaatgatctagataagaaatcatttaaagaatttatttataacagaaatgaaaataatatcgactttgagaaagtattgatattgctacaagctattccgaaacgattaccacaaaaagagattaaaaagccatataactacataagagaaataggcttaaaaactaattgaaacgagggatttaattgaaaactgcaaaatattttgatgaatacaacgaatatgtcataggtcaaagagagagtatcgataaacttgaaaaggaacgtcaggaacttatacaacgaattaaagaagataaagctaaatataaagaactaatcgctaacttacaagataatgaagctgatgaactctatactacatttgatagtaatgagaagaaattaaaagcattagagaaacgcttatcaacaaaaaaagaagtatttgatgaagctagacgtaaaaaggcgattgaactcattaaacatcaaaaagaagtgccacaattatataaaaaagataaagagaaattattagctaaattctatccaatcatggaagaatataacaatctcttaaaagaggttgatgatttaaacgctaagtatgaaaatgagtatttacgttatgctaatccatattataatgaaaacttcaacgaagatgatgaagtaaaaagggaattgcgaaatcactttagagatattttatacagtccatttattaaaggaatagaactaccaaaaacagataagtataatcacaaacttaaatttattagaggtgttagataatggctagaaaacacaatttagataaagtatcaaatcatattatgttagaaacaaatttatcagagaaagatcgtgataaattattagatgttgttgaggcacaaattaatcaaaacaatgatgagcaacgtagaaaagaagcgaaacaacaatctaaaagttcaaaatcacttatacaaatggctagagaaaatcgcattattaaaggttaatatcatacacgcctatccttagtggtaggctcattttatttgtgaggtgcatacatgaaccttaaaagagtaaactactcactaacctatcatgaaactaaaatatctgaatatactttgctaacagaatataaccctaagtttataaataccaagattaaggccattactacacaaatagagatgatgtatcacttaaatatctcacatatggctacaaatgatgtgtatggcgttgtatcaatatcctatccactagaaaagttagtgattgatattataggtgaaaaagaaaaattgaaacgtttcaaaacaaaatcgaatagaaacatgcagcaattaaaacaggttattaagcgatatacacctagtgaacaaaaggaagtcatgtattatatgcagtctaatggctcagtcatagattatgaccttatagaacgcctacaacgtgatttatacgcttataagcataaagtaagtgttgctacatgatgtacgataaacaagcgattaaacagtttataatggactatcacaaagagaaagcgtcaaatgttgtaagttatgatgatactaatatagatgatttcttttcactgagtgatgaagtcgaaccttttgaactaagtgagaatactggtaatcaagtattctttaatgaactagatcagttaatttatgcagtagcgactagaagggaatactatatatttttcttactatgtgaagggaaatctatgaatgaaattgcaaagatatttgagttaagtagagaaagaatacgtcaactattgaatggtttattagacaaattagaggagggataacatgagtgatttaaaccctagacaagaaaagtttatatctgaatacctaaagacgctaaatgtaacacaaagtgcaattaaggctggttatagtcctcatactgcaactgtacaaggtagtaggttgcttaagaatgaaaaagtggctaagtacattgatgagcaacgtaagaaagtgattgatgaaggtgtactatctgctaacgaactacttcatatcctaagtaatgcagcagtaggagatgagagtgaagtaagagaggtcgttgttaaacgtggtgagtttcaacgcaacccagacactgacaaaatgaacttagtgtacaatgagcatgtagaaatggtggaagtacctattaagcctagtgaccgtttacgtgctagagatatgttaggtaagtatcataagttatttactgataagaaagagttatctacggacacaccaatttttattaatataggtgagtggccagaagatgaggaagaagaaaaacgtaaagcactagatgaaatacacgaacaacaccctaatagaacaatgattattaatgatattccagatgaggactgataagcatgaggtagaaattactacatcgatattcattgatgatgtgcatgaagaagattaaaaaatgattatgaaaatagtacttactcaattttgagtaggtgctttttattaagtttttgattaaccaaaactattgctcaaaaagaatataagcatatttttattaataaataattaaggtattggtattttgcagtaccctttattttgtatatttagttttaattaaggaattagtttgttagtatcaaatttaaagatatctaggagggaatataaatggggtcagttctcactgttgctttaatattcttaattttagctctagtctttaaatctcttaagaaaaagaagtaagagagatatacatatttgagtagtattaattttaagttataaaaagtaagagttttctatttacatttagagtcttttataagataataaccgtagctactaaaatttactactcaaaatcgagtatcctttaaaatgactgtatcctttgggtgcagtctttttgtttataacttgtcaaaactttacatttcacacaataacaaacgaacttaaaagtctacttgtaaccagtaccttaaaatagggaagtggtttgtaaaacaaaaagcgtacctcaaattaggggtaccttttaattatatgtaatgagctcaaatgtgagtttgttattataaatgcatttactaaaaacaatttggattaagggaatatattgaaagttgtatttcgcttctaaaagctgatacgtcaagttagcgtatcagaaatttaaatatagacttattaatcaatttaatagctgacgcactaagttagtgcattagaaaaccgaaatgtcggttatctaattcagaaaagaagtttgtggcttctctgcgtagtcaaaatggcaacgcagcatacataatgatctagtattagttttattatccccaaatgtggggagtgagaatgtaaacaatttatagatactgtaaaaattgtagacaatgaataaatttaatgcgtataataacattagaagttgttcccttatgaagcacttctatattatatttttctatatgtgagtcattttttcttggctatgtccattgggcatagctttttattttattgtagacaaatatataaataatgagataatagcaaaagaggtttaagacctctaacttctttacgtacatatagagtttttactctatctcaactacaatggggctaaccttaattggttagcttctttttttgcgtaaaaaagcactctcaacttagctcatgacggactaagtgagagtgtagatgaaaagtaaggagtgaaacgtttttattactttattacatacaaattaataatttttattataatagtgtggctaaataaaaattagtgtgtaataatgataaatgagattgtctaactggcgattctttcctttccattaagtatttcttctccatcgaaaatactgtatgtttaggcaatctcgacactttaaaagctttcataaatagcataactctttaggggcgtaaagcccctttttgtatgcgaaaaagcctcactagtacacgactagtaagactaagtttcaatgaaagtaatgttaactacgaattattttaacatacctctactttatttaatagacatatactttatgtaacctttcgtgagaggaactgcatgaaaaattcatttagttagtggagaaatatgacgctaattgatctaatgacggataaggaaatagagatatggaacgaactacatgcagtagaaaggataggcattatactatcctttaatttaatgctagtgaaaaatggtgtagatagaagaatagtgccatctgtgaaattaaatgatgataggatatttatttataattaaaaagtttgaatagaggtataagtaaagtagagatattaaaggggatatgtctatggaactaataggaaaattggtaaactttattatgagtactatttctaattggataggaagtaacgaattgataagagatgttttcaagattaaagataataaaaacgataaataatgagatagttcaaacgtcaccttaaaagtggcgtttttttattttaagaagctgagagaggctttgtgttgcattggggaaagagttagttgcattagaataaaaagcttgtaactgaacaactaataacacgattaaaacacttaggtaactaaatgaattacttaactacctaagtatgtttagatggttataaatcataaaagaaattttaataattatttatagacctagataatattaaatctaatataacatccataataattacagttgtaaaaacgttattaatatcttcccatttattacaataataatttataacgctaactataaatgcaagaccataaattgttagacgagtattaaggtttttatttttaaattcagttacattatttattttagtgtaatcactagtatatttagaaaatattttcgaaaaaacgttataaaagataaggcaattaatagttatacttaatattagatagagaccgataaatattaagaatgctctataagttgaagtactaggtgttaaaccaagtatataaataaatgaaactattactaacaaaaaaatcttaaaaaaagtaaataaatctttttttaattttccttcaaaaaaatttaacgataatactatgcctactaataccaaagaaattccaaattcactacccatcattgacagctcctttttatatttttggatatattaataatgtttataattttataatataatttactttaattaatagtcaatttaacaatggttaatgatttagtaagtcatttttagtatttataaaatttctgcattttaattaaacctaatacaaataagggcataaaaagggcatatatctgaaataaagggcaaaggtatgaatgtagattttaactttataagtttataaccattgatttaatagtattttgaatgagtaagaaatacactggtttattatggtgttttcgaaggtaaaaaaccagcgagtgtgactgcatacaataatgaaatgattaaaatccatgatgaactggaagcagcaaaaacagaagcagatagagtgattcatgatgacaatgcgacaccagcccaagtgacagcagctatcgcaaaaatagatgcggtacaacctaagttagacaatgccattagtttacttcacgacaaagaaaataacagtggattagtggaagcgaaacgccaacttgatgaagcaacggcagaacaagatccaacaccaggaatgacagaagtaactgcgaataattataaagctaagaaagtagaggcagaacaagtaagcagagatgcacaaaaagtgattgaaaatgacaatgcaacatctggggaaattgcgcaagcaatagctaaagtaaatgaagctacagttgcattaaaacaagctaaacatgatttagttccagacaaaactttattgaataatgctaaaaacaatttagaaacaagcattaatcaggtgcctgaaactaaaaatatgactagtgattctgttgaaaattatagaaataaattaagccaagcaaaagatacattagctaatgcacaaaaagttattgataacccaacttcaacagttgatgaaattaataaaactatcgaaaatgtgaaacgtgctaaagatgaacttgaacaagctaaacatgacttaatattagattatgatgctattattaaaaaaattaaacaacaaactgatttaacagatgctcaaaaggataaattaatagaaaagacaaaagcttctacaacttctgatgaattagaaaatattaaacataatactgatttattaaatgatgcgatgaaacaattaaaagaaaacatcgctgaaaaagataaagtcaaagcaagtattaattatactgatggagataaagataaaaaagatacctatgatgatgctctaaaagaagctgaaaaactaattaatgatgcaaaaaatcctattattgatcctagcgtgataaatcaacttaaagataagataattgatgctaaaaataatttaaatggtgtagaaaaattacaaaatgctataaataatgttaaacacatattggaaagcttaaaacatttgaacaatgcgcaaaaagatgcgtttaacaatatgatagataatgaaaattcacgtgataatttagatataattattaataaagctaaggaagtggataaagctatgaaacatttaattgatgaaatagctgataatttagatatcaagcattctgttaattattcagaagcttcaccagataaaaaatccgcttacgatgaacttattaaaaaagctgaagacttaataaataaaggtattggcacaaatgcatcacttgaagaaattaataaattaattcaagatattaaaaaagcaaaatatgatttagatggaaaacatcaagttgaattagctaaacaaaaagctttagaagagttagaaaatgaagttaaccgattgaaagatgaaattgacaacaatcctaacctttctaaagaagataaagaaaaacttaaatctaaattagagcgtcttcttgaaaatgcaaaaggtcagattaataatgcaactacattaacagaccttaataagattaaagataatactcaaaaagaaatcgataaattaaaagcattaattgatgctaaaactttggctaaacaagaaattattgattttgctaataaaaaacatcaagaaattctaaataattctaacttaactgatgctcagaaacaaaaagtggtagctgaaatagataaagctttacaaaaagcgcttgaaaacattgataacgccaatgacatcaatgaaattaaccgtaaacttaaagagggcaaagataatatagcgaaaattgttgcaaaagaaattactaatgcgttaatagataataaaattaaagaaattaaagcacgcaaagatttaacagatgaacaaaaagctaaattaattgattatcttgaaaaacttagacgtgatacgttaaaagaaattgataaatcacatattgatgatatcggttcaattatccaacaattaatggacaaattgaatatgcttgatattgataaaattgaaaacatcttaagtcataacaataaaaacaataatcaaaatcaatcaaatgttgacggtattcaatctaataacagtcatttatctaaatcacatagattacctgatactggttcagaaagtacatctattcaattagagattgaattaatgacactattagttggtctaggattagtattaaaaaatcgtagaaaaaaacaaaaaaataacaagaataaaagataaaaaagatataacttagtatctttaaaaataaagagcaggaaaccactataaactgggtttcttgctcttttttattaaataaatatgaactatgcttcaaaatctataataattcttccagcgttctcatgattaagtactgtctcaatagaatgttttaaatctttaaaagcaattgtatttttaatttcatgtaatttattagattttaaatcagttgctaatcttctccatacacgttgacgtaatttcattggtgtcataactgaatcaagtccaacgacgcttacaccacgaagaataaatggaaatactgaagtttcaaagtggttacctccagtcataccaattaatgcaacaccaccaccatttgttagatgctttgctatataaggtgttccaggaccaccgcaaggatcaatagcagcttgccaagttctttttcctaatatttcattactatcttcagaaatacgatcgataacttctcttgctcctaattcttttaatttattcgtagcttttttatttccagtacttgctacaactttataaccaagttcatttaacatcattacagctaaagacccaacaccaccagaagcgccacgtacaagtactttatcgccttcaagtgtcataaagttagctttttctaatttttctattgctaaaccagctgtgtaaccagcagtcccataaatcatcgcttcttcaagtgttagattttcaggacatttaacaatccaatctgatttaacacgggcatactcactaaatcccccgtaatgattgacacctaaatcatagccagtaataataacttcttcacctttttcgattgtaggatcatcagattctacaactgtacctgctaaatcaattccaggaaccattggatatgatttaagtacaccgctatctttaacagtggctaaggcatctttataattaataccagaatattgaacttttattaaaacttcaccttcaggtaaatcattgattgataaatctttgaaatcacttgtgacagtgccatcattatctttttcaaccataaacgctttgaaatttacactcataaaatcgtactccttaaaaataaaaaattagatgttaattgcatatcctaaataaccataccacattttaaacgagtcattaagttaaaaagtttatataaattaaatataaaatagtctatattttgataaaaaaataattatattgacagtaaaacagcataaatatataattttactgataatgattatcacttgataataatcatgttgatagagatacaaaactgtaattttaaaatttagatgtagagaatatacattttaaaatatttaacatcaaaagataatcactaaattttaatgaggtgaatttattatgaagaaattaccaactattttactaacatcatcactactattaacagcttgtggtcataataatcacgataatgctaatgagaaaacttcaaaaaaatctacaaatgagaataaagtagcattacagaaagcagctaaagaatatagaaaatatacaaatgaacagttagatcagtttttaaaaggaactgaagaatttgtatctgcaataaaagcagatgatattgaaaaagcaaaatctttgtatcctaaagtacgcatgtattatgaacgttctgaacccgtagctgaagcatttggcgatttagatcctaaaatcgatgcccgcctagctgatatgaaagaagagaaaaaagaagataagtggacagggtatcataaaattgaaaaatctctttatcaagaaaataaaatagataaaatgactaagaaggatgctgatcaattactaaaagatgctaaagaattagatgctaaagtagatacattagatattacacctaagttaatgctacaaggatcagtggatttattaaatgaagtatctacatcaaaaattactggagaagaagagatatactctcacaccgatttatatgattttaaagcaaatatcgaaggtgctcaaaaaatttatgaattatttaaatctgaattagaaaagaaagacaaaaaattgagttctacaattatggataattttaataaagtgaatcaattacttgataaatataaaaataatgatggttataaagattatagtgcagtaactaaagaagatagaaaagcgttatcagatgcagttaactcactaggagaaccattaagtaaaatggctgtggttacagaatgagtaatataaatcataaaaatcaccctcaaatgactagacgttcatttttaaagttactaggtataggaagtgctggtgctgttattggagcaagtagtgtaggcagtatcttttcgtttaaatctatgtttgatactcctgaaagtgaagaaaacgattcatatgaattttatggacatattcaagctggtattactacaccaactcaaaaaaattgtaatttcattgcattagatttaaagtccaaagatcaaacattaattaaagatatgtttaaaaaatggactcaaatgtctgttagtatgactgacggtgctattattggggaaaatagtaacaatacactattaccacctgtagatactggtgaatcaataggattagatgctagcaaactcactttaacatatggcgtgagtaagtcttttttgaaaaaaataggattatcatctaaaattccatttgattttagagatatacctcattttcctaatgatcaattagatgaagagtatagtgatggagatattatgattcaagcttgttcaaatgatcctcaagttacttttcatgccatacataacttaatacgaccttttagagacatcattaaaattcgctggtcacaacatggttttatttctactaaaaaaaatgaaacaccgagaaatttgatggcatttaaagatggtacagttaatccacgaaacaataacgacttgaaaaaatatgtattcattgataatggatgggcagaaaatgggacgtattgcgttataagacgaatccaaattcatattgagacatgggatcgtactgcattagaagagcaagaagcaacatttggtcgtaaacgttctacaggtgcccctctaacaggtaagaaagaattcgataatattgatttaaaggcaaaaaataataagggtaagtatgttatcgatgagaatgcgcatacgcgtttagctcgtgaagtaaaaacttctattaaacgtagagcatataattataatgatggtacaaatgctaaaacaggtgacttagatactggactcatgtttatttgtttccaaaaatctattcaacagtttatcgatattcaaaataatttaggacacaatgataaattaaacgaatatatcacacatcgaggttctgcatcatttcttgtattaccagggatacaaaagggaggctatatcggtgaaacactatttagttaagatatcgatagttactctcttaatcattattacacgtttgttttcattgacttcagttagtgttgcaaatgatagtcaattaaatgatgcgtatgtagctatctctgatgcgaaatggacattagagcacaaacaattaaattataacgaaaaacaaaacgtgttgaatgaagtaaaacataaaataatgtctttaaatattaaaggaaataaaaaaggaaaagatgttaaatcgaaacttcatatgattgatcaagcaacgactacaaataaacaaatcgactcgttatcagaattaacaaaatctctcatcgtttacgaaagttctgtatcgactgatgatattgataaagatattagaaatttaaaaaaacaaattaacgcaaaagataatatcattcaagaagctgtaaaaaataaagatagatcaaaattacagtctattaataatatgttaaatcaaatttggaaaaaacatgaaacggccatcagaaattatgatgaaaataaatatggacaaatagaagtgtacttgatgcagttgcgtgtagctattcaaaaagaaccattagacataaaaaaagtagataatgcttggaagacatttaaaacaagtattgatactgttgataaaaagcaatcaaatactgaaaaaaatcaatataaagttacccaacttaatattgaattagagaaagcaatcaaaggtatcgagagtcatcagttaaaacaatcagatgaggcactgactaaatttatacaaatatggccttatgttgaaggcaaaattcaaactaaaaacagtagtttatatacaaaaattgaagataaaattccatattatcaaagtattttagatagtagtaataaagatcgtattaaagaaagtttaataaaaataaattctgaaattaaagatactgtaagtgaagacgcatattcatccatagatgtaatgattatatttttacgtgaaggattagaagtattattaatcatattgacattaacaactatgaccagaaaggttagagacactaaagggacaacaagtgtcattggtggcgctatattaggtttgattttaagtctcgcattagcatttatctttattcaagtactaggaaataatggattattacgtgaaggtatggaagcagcgctaggaataatagcagttgttttaatgtatattgtgggtatatggatgcatagacgttcaagtgctaagcgatggaatgatatgattcaacaaatgtatcaccatgcaataagtaatcgaaacttagcattattaggtacaattggattaatatccgttttgagagaaggcgttgaagtcattatcttttatatgggaatgatgggaagtataaaaactttagattttgttataggaattatactagccattgttatattaatcatatttacattgttattcaaaacagttatacgattgatacctatatattttatttttagagtactttctattttaatatttattatggcatttaaaatgttaggaattagtattcaaaaattacaattacttggaatgataacacaacatagtattgagcatattccaacacttaatatcattggtttttatccaagtattgaaacgatgagtgcacaattaatttatatactattaattgcttatttcactttaaaacatactaaaacaaagcatcatatctaaattgaaaataaagtctcaaacgagtagattaatttactcgtttgagacttttgcatttgattcgaattcattaatgtcgagtagttattttagttaaaagaatgcttatttcaaataaaataatgagtggtaaagtcaaaaatagattcaaagtgatatctggtggtgcaagaatactagcaataatgaaacaagtaaaataaatatatttgcgatattggtgtaattgtttaatatctattacatccattttaactagtcccatacaaaacataggtaattgaaagacgacaccaaatataaataaccaccttattaattcatgtaaataagcattaaaaccaatcactggttgaatatacattgttttcgataatgttaatgaaaattttataattaatggaaatccgatagtataggcgaaaccgacaccaatgataaataacgcagtacataataaactatatttataaataaaaaaacgttcacgttgatgaagccctggtgatataaatgcccataattgatagaaaataataggaagaactaagcacaaagttacaaaactaatgattagtatatagatttgaatcatttcagtgaatgaaaaagtatgtaaaacaacttgagtgcgtttaatatggtaaacaaaagttgtgatccaccatttagatgatatgtatactaacggcaaagtaattaaaaatgaaataagtatattaattaaacgtcgccttaattcttcaaagtgttcgagtaaggtcgaactagtttgatttgtctcgctgttgtttagaatgtttactgggtgtttcctccacctcatctgaatcaatgtgttcagctgcagacttaaattctcttaaagtactgccaatcgctttaccaaattgtggtaattttttaggaccaaaaataattaatgcaacaatactaataatgactaaactggtaggtccagccatgcctaatataaataactcatgaaacatcttaaacacctcactttaatatagtctatctttactttatacttattgataattattatcaatacatattttaatttataaaaaaataatttaatatagtgtttgaaatgtgtttgataaggaataagatattatctggttttgagaaaaataagtacaataaaaagaggggaaatatgaaagaagaaattgaagaaattaaaaaagataatgtaagtgagttaagaaaaattgcagaaaaaacgttttatgatacttttaaaggtagttatactgatgaaaactttaaaaaattttttaaagaaaactataatgaaacgaagttattatcagaaatcgaacatcaccaatcatttcactatttctataaggtagatgatgagattgctggttatttaaaattaaatattaatgaaacacaaactgaaccaaaaggtgatcaatatttagaaattcaacgcatttattttgataaggattaccaaggtggaggaagaggaagtcaatttattcaattagctattgataaagcaagggagtataataaatcaaaaatatggttaggtgtttgggaaaataatccttctgccattgacttttataaaaagcaaggatttgaaattacaggacaccatgactttattaatggtaatgtaatagacatggatttaattatggaaaaagaaatttaaaataacacaataaagcactaagaggacagaaaagttctgtcctcttagtgctttattatttatctaaaatatctctcataagttgagttagtttttttagagattgattattacgatttataagtgcatgtcggtgaatggtaggaatcgtatcatgtattaaatgatttagtaacacttcttcgtctgtgtaccaaacttttgctagactgttcagcacatcaatatagacgccacgttcttctttatattctttgtgattaggagtatataaacaaacttttttatcaatagttaaggcatcaaaaatgatagaagaataatcagtaagtacaatgtctgatattaagattaagtcttgtgtttcgatatctataggagcctcaatgacaccttctggaatagcatcatcaccttcaatatgccccttatatatcacatagtatttttctagtaactctggtgtcatcgttaaaggtgtaaatgattctgtatttttatgccatgttggcgcatataataaaacaggttttgtatgattaagttttaatttttcacgtatttttctttgctgattttgattatctttatagtttagtaaataacttactcttggataaccaaaaggaagaaattgaaccgtttcattaggaaaagcagtctcaaataaaccttctgaagcttttgaatctaataagacatatgattggtgtttccatttattatattttcttgctctgtaattataaatattttgattttgatagggttctttactatctaaaaataattctttaataggcgtaccatgccataattgaatgactgtaccattaggttgatacgcttcaggcatataactttcaatgactacaatttttgcagtttcaataagttctttattatgttctgcatcaatgggaaggaaatatggtccatgtctatcgtctgtaatgtaataagcttctgttgttggatttcgttttacaaagtaattaaaaaggtatttagagttacctctatagccataatcgaatcctaaaaatacgacatgatttttcaatttggatgtatctttagtatagatataacttagttttttatgattttgaatcgcacgttgatgaattttattgtacatccatttaggcaatttaaattttgttgttacaagccagctatcagcaaaacgaagagtttcgtcagctaatggatgcttatatttaggaaatggaatcgaatggccgtggatataagctagtttatttaaatcaaagtgattggcaattttaatttctcttgtatctaacgaattccaaaatgaactagatgtctgtaattcctcaataaaatcaaaaacaacatgtccatctatatcaacctcattttttaaaatagtgatgactgctaggtccataatagattgaatttgatattttgagaggtaaatcagcgcagtatcaatattataaatgatatttggataatgattaatattattcatccaagcgagaaaacttaatttatcattcccaaaataacgacaatcattaagataaacaccatggattgtgtaatcaaccgcaatagaatgttcacctaatgagacagcattaagcatgtcttgattaatttttatttcgttagaataggggataaaatgtgaataccctgcagatttagctttattaagttgtatatctagatgtgacatattagatatatttatttgtttaatcattatgcattatcctttaactcctaaatttcatatttttattttaccatgcacttttaaaaaattcatatttacatgaatgataatataaaatcatatgtttatgaaaattcaaatagatcttactactattgttgacataaattatttttacagtattgtcaattgtgataagaaatgttatattatttttgtgaaaatattcacaaaaataaaaagtgtaatattctaattttaacttgattacaatatgttaatttttgtgaatacctgttaaaattagaaaagtgaatttttagttgtttagctagataattcatcaatataataaaatattaaggaaagaagcgtttaaactatgttagtacattcttttaacccttttggtaacttagcgttatctagtttaattgcagcaattccaatcattttattcttgttatgtttaactgtgtttaaaatgaaagggatttatgcagcaatcactactttagtagttactttacttattgcattgccattctttaaattacctggtggtattgctacaggtggtgtaatagaaggattctatcaaggtattatcccaattggttatatcgttattatggccgttttattatataaaacgactcaagaatctggtcaatttagtacaattcaagatagcattatgagcatttcacaagaccaacgtattcaattattattaattggttttgcttttaatggcttcttagaaggtgctgcaggtttcggtgtgccaattgcaatttgtgcattattacttgcacaactaggttttaaacctttacaagcagcaatgttatgtttaattgccaacgctgcttcaggtgcattcggtgcaattggtattccagttggtattgtgaatacacttcatttaccaggacatgttgaagcaatgagcgtgtctcaagtgtctacacttactttagcaattattaactttattattccattcttattaatctttattattgatggttttaaaggtattaaggaaacattaccacaaattttagtagcttcaattacttatacagtattacaaggcttaattacagtatttgttggtccagaattagctgacatcattccaccattagtgactatgggtgtgttagcagtattctctaaaaaattccaacctaaaaatatttttagaatacaaaaagatgttaaaccagaagcagttactccacatagtggtaaagaaattttatatgcatggagcccattcattatcttaactgtaattgtaatgatttggagtgcaacattcttcaaaaacttatttgcaccaaatggtcctttatcagcattagtatttaatttcaatttaccaggcacatacagtgatgttacacacaaaccaattatgttaacttttaactttattggtcaaactggtactgccattttactaacaattattattacagttttaatgtctaaaaaagttagctttggtgatgcaggacgtttatttgttgaagcattcaaagaactatggttaccaattttaacaatttgcttcatcttagcaatttctaaaatcactacatatggtggtttaagtgctgcaatgggtcaaggtatcgcaaaagcaggcggcgtgttcccaatcttatctccaatcttaggatggatcggtgtgtttatgacaggttcagtagtaaacaacaactcattatttgcaccaatccaagcttctgtagcacaacaaattggtacaagtgcaccattacttgttgcagctaatactgttggtggggttgcagctaaattgatttcaccacaatctattgcaattgcaacagcagctgtaaaacaagtgggtaaagaatcagaattacttaaaatgactctgaaatatagtattggactacttatctttatctgtatttggacatttatcttatctatatttatgtagatatcattaaaaggattgcaactcggagaattccgattgcaatccttttttatttgaaaatagaataaaaataatcgtaaattttatctggagaataatgttcaagagtttgatgactcgatttaatcatattttctgaatgcgttctcttttgaatagcaagattaatatattttgctaatgattgtgcattcgcatagtctgctaaataaccatttttattatgttgaatcagttgtgaaggtccaagtgtatctttaaaactaataacaatattgtcttgagccattgcttctaatatgaccattccaaacccttcatttcgtgaaggaacgacagtcattcggctttgtgccaatttttcattaaggtgttgagtggctggatgtatggttattaagtcattaagctggtaatgattaatagtttcttgtaaattttgatgttcttgaccttcaccataaatctcgattttatagtttttctgtctaagcgtatctttaatgagttggacactttcgattaaaatatcataacctttttcatattctagacgtccggcacttaaaataatattttttttaggtagatttaattttttagttcgaataatattaggaacgacatatacaggtgtttcaatgaatgattcataatggtttttatcagtatgagttaaagtggttagcgcgtctagatgttgataagcatctaatatttcttgtcgatacgctttgggataggcatttaaattcatatgttccatacctattgtcattgcatgtccatgataatatttagaaataaatatattaaaacttgctcttgtacctatgagtacatcggtatctatatcattaattgcacgtatcagtttatgttcaatatacttggagaattgatttaaaccaggctcatgttttgaaaggtagataggctttaataaaggagtgtatttattcaatcgattcataaagatagaaatcacattttgtggttttaatctataatcaactaaggactttattttaatagaagaattaagtttgaagtaaggcatatctttagctctaaaaatagagataatttcaacgttatgacctttgtccgctaaggtatttgctaattcagtaattgctttaactgtgccacctaaggcgtatatattatgcattaaaaaagtaaatgatttcatgattgtacctcgttattaataatattataaaaattatagcatgtaataaaccaactgtataaatgttgtaagctttataataaaattaaaatatttttgaaaatagagataaaataatgtgataattcgtgtaaatacttttttcaaagagaaattatgtatataattactatagtaattaaaattttatttacgcttttaacgtcaaattaatatttatttttttatcgataaaagaaagcgttttaaattaaaaatggtcgtgtttatttcgactgaagatgtgattataaaagggggactgggttgttatgagtatagaacatagcaaaacagatgtcatcttaatcggtggcggaataatgagcgcaacattaggaacattactaaaagatttatctccagaaaaagaaattaaaattttcgaaaaattggaacaatcaggtgaggagagttctaatgtatggaataatgctggaacaggacattcagctctatgtgaattgaattatacaaaagaaaataaagatggcagtattgatgtaacaaaagcaattaaaattaatgaacagttccaagtatctaaacaattttgggcttatctagttagaactggtcaactagaacatccaggtaattttattcaatctgtgccacatatgagctttgttaaaggtattttaaacgtagactttttgaaaaaacgtgtaaaagctttaaaagaaaatattttatttcaaaaaatggaaatcacagaagatcgagataaaattgttgaatgggtgccgttaatggtagaaggtagaacatcacccgttcctattgcattatctcgggatgaaactggtacagatgtaaactttggagcactcactaaaaaattaatttctaatttaaaagaacataaagtagatgttacgtatcatcaagaagttcaaaatattgaaagattaaataatggttattggaaagtgactgtcaaagatttgaagtctaatacaattcacacgtttgaatctgagtttgtgttcattggtgctggaggagcaagtcttccacttctacaaaaaactggaattaagcagtctaaacatgtaggtggtttcccagtaagtggtcttttcttacgttgtaaaaacaaagacgttattgaacgtcattatgcaaaagtatatggtaaagcagatgttggagcaccgccgatgtctgtaccacatttagatacacgatttgtaaatggagaacgatctctattatttggaccgtttgcaggcttctcacctaaatttttgaaaacaggatccaatttagatttaattcgttctgttaaaccgaataatattgtgacgatgttaacagcaggagttaaagagtttaatttaactaaatacttagtttttcaattaatgcttagtcataaagatcgaatgaatgatttaagaatctttttaccgaatgctagagacgaagattgggaagttgttattgctggacaacgtgttcaagtgattaaagatacagaagatagtaaaggaaatttacaatttggtacagaggtcattacttctgatgatggatcacttgcagcattattaggtgcttctccaggagcttcaacagctgtcgatatcatgctagatgtattaaaacgctgttacaaaaatgaatttgatgcttggattccaaaaattaaagagatgatcccatcatacggacttaaacttaatgagcacgaagaagtttataacgcagtaaataaagaagtaagaaaatatttaaatgtgaaataatcgaaaaaacaggtagtgtcatttttaacactgcctgttttttcgattaagttaaaataggatatgcggaaatagaattttaaatgtcgtgccatttttagaatcactagatacacatattttaccgtgatgtaaatcaatgatggacttagtaattgctagtcctaaaccattactattatcactagcattgagtttataaaaacgatcaaatagatgtggtatcgcttgtttagaaatagtttgtccttcatttgtgaccgcaaacataatatgattattttcttgattcaaagtaatatcgataatgccatttatatctgaatatttaatagcattttgaattagattcgaaaatgcttgatgtaaaaggcgacgatttccctgaaaatatattttatgcatatcagataataacatcaatgatttatcatcaatcgtgtattgttcatgtcgaatgatatcagtaatgagtgaagataattctaaattatcgtcaacagataagtgattcgcattatctaattcagatagtaatagtagttcttttattaagttactaagacgtgtaatttctaaatgaatatcattgattaagctatgacgttcatcttctgaatgcgcaaattgtaattcagttaatagtctttcaatatgtgtaagaggtgttttaatttcatgtgaaacattttgaacaaaatgttgacgcatgtcatctaattgttttaatgactgacgcatggtatcaaaacgaaactgtaaagttccaatttcatcatgacgggtatgagaaatgggtgtttcaaaattcccattcattaattgttcggtcgccatttttaactttttaataggtttaatgattgagtatgttgaagcaataacaagtgaaatagatatcagcaataagaaaataagtaataccaataaaaatattctaaactcgccgaatgttttacctatatctggtcgcataaatactgctataggttcatggtcttcataaaatcttatgcctacagtgttatcagtttcattatcaaagaaacctgtcacgaataattcaaaaggtttgttttttataccgtgataatcatgaccacgcataacttggttaatagatgatgaggacagtgtatcttttctaaaaggttcaccataaaatgttttttgtccttgtttatcgacggtaacgatttgataattcatttgtcctaaatgttgaaaataagattttacgtattttgaaggaagttgatgttcataagtacgagcttcttttaacgtacgcataattttagtgtcattattttctttgagattgaaatgataatgtatatttgcaatgaaaaaactaactaatgcactaaaaataatcacagtaatagtataaattgcaatgcgactatatagtgttttaaacatctttattcaccttgtatccctggcctcttactgtttgaatttcaatagttgcctctaatttttttaaccgtgttcttaaacgcttaatatgaacgtctactgttctttcatcgcctgtataatcgaaaccccaaattttttcaataatagactctcttgtgtaaatttgtcttggatgagtgcataataaaaataggagttggaattctttagtaggaagattcatttttttagatgctacactcacctccataaattcatcatttaaaatgacatttcctatttcaatcttattttgcgtattaatttgataacgacgcaaaacggcacgaattctaaataataattccttaatttcaaaaggtttagttacatagtcatctgtgccactgacaaatgcacgttctttatcacttaatgcatctcgtgctgttagcataataactggtaattgatagcgatcttttaataattgacataattcaaatccatccatacctgtcatcataatatctacaactgcgatatccacgcgatgatgattaagatattttaatgcttgttctccactcgaatgtgtcacggtttttatatgatccgcttctaaatgtttagaaacgtaatgcaagagttttggatcatcatctacaattaaacattttatcatttacttttcgctccttttctaattattatacgaatctttaaaatctaagacaattttctttgttgttcatattcagttcatatttactctctatactgtttaataaagataaatagggaggaaaaagaaatgaatttagcttggaaagaaataaaattttataagtttcgatatatattaattatgctaatcatcttcttactagggagtatggtattatttattaatggtttagctcaaggtttagcgagagaaaatgtgtcatttttaaataatcaaaatgcacaaacatatattattgaaaaaatgaaagaacctaaaattgaaaaatcacaacttgattcaaatcaacaaaataagatagaagatattataaatcaacaagcaacacatcttggaccacaaacattaaaattaaaacaacaagatcaagatattcttacgttctctacttctaaagaagatcgtccctctttaaaagaaggtcgctatcctaatcattcatatgaagttgcaataaatgataaattaacgggacaagatgtaaaaaaaggagatatgattaagtttaaaggtcataaagaagcttataaagtaagtggtattattgaagatacaatgtattctcatagctcaatggttatgatgaatcattcagattttaaagcacttaataaaaattattctacattctacccagttaaagaattaagtaaaaaagataaaaatagaattaatgatatttctaatgtaacaactgttagtgaaaaaacattgactgataacattgcaagttaccaagcagaacaaatgccattgaatttaatgataattagtttgttcgtgattacagcaattgtattaagtgcatttttttatgttatgaccattcaaaaaatctcacaaataggtatattaaaagcagtaggtattaaaacgagacatttattaagctcattaattatagagattattttaactaccatggttggtgttattttagccacagtacttattttaatattaagtttaattatgccagttacgatgccattttatttaggttacggtacaattttattaatgattgttatttttcttattgtaggatttatcggtgccttactatcatttatcaaagtagtaaaagtggatccaattgatgctattggaggtatggaataatgacattaaaactcgaacatattagtaaaacatttggagaaggttcagcgaagacaaaagtattaaaagatattaatttagaagttcaaccaggagagtttattattttaaatggtgcatcaggttcaggtaaatcgacattattaaatatattaggtgggttgttaacacctactgatggtaagatattatatgaaggtcatgacttatattcaaattataaaaatagtacagaattaagacttaatgatattggttttatttttcaagcgtcacatcttgtgccttatctaacggttgaagaacaactcactgttattgctaaggaagcgggagtaaataaaaaagaagccgtttcaaatgctaaatatttattaacagaaattggtctcaaagatcgtttgaatgcatttccacatatgttatcaggaggagaaaagcaacgtgtagcaattatgcgtgcctttacaaataatcctaaaatcattcttgcagatgaaccaacagcaagcttagatgcgagtcgtgctacgaaagtagtagagatgattagggaacgtataaaatctgaacaaatggtaggtattatgattacacatgacgagcgattatttgactatgctgatcgcgttgtaaaattagaagacggcaaaatacttaattaaaaagtgaatagtattcatactatggaaaagtctggatcatataagaaaatgatccagactttttgtatattaaagtaatatccaaattgacgctataaatactccgactaaatacaaagtcaaaagtaatttatattgatatataagtgcaagaaaatctcgtaagagcgctttatctagaaaatgataaggcgttgaacttcctaatcctattatttttatatttaacttttgtgcaaaacgtaaggctcttaaaatatgaaattgactcgtcacgcataaaatactagggacattttcaaacgatgtattaatgaaagatttagaatataaaaagttctcatatgtactgcttgattgtgattccatcaatattgaagaagatgatacaccacatttaatgagataattcttcattgctaaggcctctgaaattggttcgtcaggaccttgaccaccacttaccaatatattgcaattatgcgactgtactttatagatttctaaagctctatccagtctagaggctagcataggagtgactgtttcattgaatatacctgcgccaagtataagaatcatatcatattgtttatgggttttagcacgttcaaatgcagaagaaaaaattaaatatataatgaaagcgtaacaagcactaaataaaattaaagcaatccataaaaacatgccatttaaaataggtaatggtattgtactaagatatataaatataccaataaataagacaccatttattaatctacgaaacattttatttaagaaacgggttccttttttaattttgaatagatgagaatgtttgacaagcaaaccgatggtagaaatgataattaatataaacaatccagttggtagggtcatggtcatgatattaatgagactaatggtgaaacataatatcacgcttgtaataaaaaaagaaagagagataaagtgtcttatattaaacaaaacacttaggataataattaaaacaataaataataaaatgattgctagcatatttgataacctcatatctatttatatatttaaatgtaatgaaagggtcacaatttagcaactattatatttttctatttgttttcaacgtggaaaattattgatattatttaacagagtataaaaattaactgcacaatatatgaaattatttaagtaaggagatttgtaatgagtagaatctcaaaaaatcatattgaatttatgaaacatttcatagatgaaacaaatacattaacgtctaaacttttaaaagatcaacaagtaaaatatggtgtttctactgaacaatcgaatgtactacgattactcagtcatcatcaagctttatctataacggaaattactgaaaaacaaggggttaataaagcggcagtaagtcgtcgtataaaaaaattaatagaaagtgactttgttgcattacagaagcctaacaataaaatagatcaacgcttaaagtatattgttttaacagagaaagggcgccaatatacggaagaaaataacgaaattataagtcaaattgtgaatgatatggttaaagacttatctagtaaggatatagaaaaagctctgagtgtgctttatattatagatgaacgtgtgaagcattttaatgctaaggtaaaataaacgttaatcggaaattatctccacaagaaaaaagagttataatatttgtgtgaaaaatataaatgacattgcatcttatgagaggaagttgatgacaaaatgaaacaatgtccttattgtggacaagaattaaataaaagtgataggcaatgttctaattgcggaaatatgatacctaaagaaaaaaataaagcaacatcgtcctctcaatcagaacaatctaatttaaaatttaaaaagtttattccttgggtcattataactttcattattattttaattggtattgttttcatactattaaaaaatttcaattctcccgaagctcaaaccaaaattcttgtaaacgcaattgataacaacgatgctcaaaaagtagctacgttaattagtactaaagatgttcctgtagatgatgaagaagcaagtgtttatattcaatatattaaagatgaagttggaatgatgaaatttattcatgatgtcaaacacacaacagataaattaaataaaagtaatcatgattctgcctatatacaaacaaaaacagataaaaatgtattaaaaattagtaaaaatggaacgcgttttttaatctttaataatatgagttatagaccacctacaaaaactgttattgttaagccgaaaatagatacaaaatatgaatttaaagctggtggaaaacgtagagtcattcatgcaaaggcgaatcaagcaacttctattggtaaatacatttcaggtgtttatgctatcgatgctgaaaaagacacagaatatggtcattttacaggtcaaatgaaatttgattttagatatgctaaaggaaatactgtggaggttaatgagaactttaacgaagcttcacttaaagttaaattaaagggtaaaagtgacttagataaaaatacattgaaagtaactattaatgataaagaaatgaaatatgatgcatcaaaaatatatggtccatatcctcaaaataaagacattagtgtttcagctacaggtatggttaaagacaaaacatttacgtctacaagtaaaacaataaaagcaaaagatttaggaaacattaatagtgcaatactagattttgatgaagataaaatttctgattatgtttcaaagaaaactgaagaagaaaacatacttagagttacgttagaaccattttttaatcaatatacctatgcgctaaattatgctattaatcaacaaaattttgagataataagtccatttctaaaaaataagtctgatgcatatatagatataaaaaatcatttaagtgattcaaagcattttgaattctcacagttgttaagcgcaactcaaagtggagatattattaaagctaaagtacaacaaattaatcaacgcggagaaatagaatatgtcacttatgaaatagaagaagataaagataatggaatattacaaatcataaacattaaatagattctaaggagaatatttaaatggaacaaagacataaccaagataagcattccttgttatttattattattctaggtatgttgactgctataggaccgttagcgattgatatgttcttacctggtttacctgaattgaaaaatgattttaacactacgacagctaatgctcaattgacactatcgttttttatgattggtcttggaattggtaatttatttgtaggaccgatttccgatagtgtggggcgtaagaaacctttaattatcgttatgaccatttttactcttgcaagtctcggaatcatatttgttcataacatatggcttatgattatcttaagacttttacaaggtattaccgggggaggcgcggcagttatttcaagagccattgcaagtgatttatataaaggtaatgaattaactaaatttctatctttattaatgttagttaatggtgttgcaccggttattgcgcctgcgcttggaggtatcattttaagtgtagcagtttggagagtcgtatttgttatattaactatcttcggtatattaatgataatgggaagcctaacaaaaataccagaatctttaagtttagagtatagagatagcagtggtatcaaagtgatatttcagaattttaaaagcttattaggtacaccacgatttgtactacccatgctaatacaaggtgtttcatttattttattgtttagttatatttctgcttcaccgtttttagttcaaaaaatttatggtgtatccccactgcattttagttggatgtttgctggaataggaataacattaatcatctctagtcaattaacaggaaaactagtagattatattcatacgcaaacacttttaaggttattgacatgtatccaaattattggtgtatgtattgtttcgttaacgctcatccaacatggaccattcatttttttagtgattggttttataacattagtagctccagttacaggtgtagctactttagggttttctattgcgatggaggaaagtaccactggtaatggtagtgcttcgagtttattagggcttgtgcaatttttatttggaggtattgttacacctttggtaaatgtaaaaggggaatataacagtacaccttatctaacaatcattattagtgcaattgtgatccttattattttacatcttattaattttaaagtgtttaaaacaaaaagataaataaatagggaacaaaacagaatttaatttgattctgtcttgctctcttctttattatctttgtaacttaattgtattggataataaagaatttgctacttctttaggactttcttggcaaccgcttcttagccagtaaagaattactccaatttgaccgctaattgtataagaaataaaaagctctctattttgaattaaagtttcattttcagttaaaatcttatcgtaatatttcttggtaatatctaagtagtccataactaaacttctatttggatttgagataaaaatagcgtgaaaaaaagatttctttctatatatatatttgagaataatatggaagaacttaaatactttttcaggctctttttttatattgtgaaaattattagaaagtgcttttaataatttttcatacttatttaaatggtaactttggattgtagacaataagtcgtatttatcctgaaaattatcataaaaggttgaacgattaattttacattttgcacatatcattttaattgaaatttgttcgaaaggataatcttctagcaaatcgatcatacttattataattttatatttcgcttttaatttcatgtatgtcacctaaattaaaaagaataaccgacaattttttaagttttgttggtgttttttttattgatatgtctttataatatataaagtgatttttaaaagcaaataggaggaaagttcaatgaagaaaatggtgttaatcaatatcattactatcgttgctttagttattatcggagtagttggattttatttctatcataatgcaactagctatgtaacaactgataacgctaaagttgacggcaatcaaattaaaattgcgagtccagcatctggacaaattaaatcttttgacgcaaaacaaggcgataaattgaaaaaaggtgacacagtggcagaagtaactgctcaaggtcaagatggtcaaactcaagatcaaaaaattaaaatgccacaagatggtacaattgctaaaactgatggaatggaaggctctatcgctcaagcaggttcaccaattgcttatgcatataatttagatgatttatacattacagctaatatcgatgaaaatgatttaagcagcattgaaaaaggcgataaagttgatgtaacaatcgacggtcaagattctaaaatcgatggtaaaattaaagaaatcggaaaagcaactgcaaatagtttctcattaatgccatcatcaaacagtgacggtaactatactaaagtttcacaagtgattcctgtgaaaatttctttagattcacaaccatctaaaaatgttgttcctggaatgaacgctgaagttaaaatccataaagactaaggaggtcataaaatgacagtgaccttcattattggatatatcgttgcagcggtcattttagttggtttaattaatttattcgtgttgaaatcacgtaataaatctaagttaaatcaatcaaagggacaacaagtaaatgaagaatctaagagtcaaaataatccatctaaatttaaaatgagtgacttagaacaaaataacgatgcaaagaatgcatcatcttctcagatcagtgaagagaaaaaacgttactttaataatgatcaatctcattataaggaagataacgatatcaataatgataaaagaaaaaatcattttgaagaagaacaagagcaacaagattcatcttcagaacaaattcatcctgagcaaaagcaaacttcatattccttacactactcagacgatgaacaacacaatgctcatgctgaagatacagtaaaccataatgatagagatgttaataatcaacatctttccaaagattctatttatgaacctattaatcctgattcccaagaaggacgtgtgaacgaacgtataaaaaaccaaacacaagattttgtcttcggtgcagggattacaagaggtaaaattttagctgctatgttgtttggtatgtttatcgcaattttaaaccaaacattacttaatgtagctttacctagaattaatacagagttcaatatttctgcttcaactgggcaatggttgatgacaggcttcatgttagtaaacggtattttaataccaataagtgcgtttttatttaataagtattcatatcgtaagctatttttaatagcgcttttattatttacaatcggctcattagtttgtggtatttcaactaacttcccaattatgatgggaggacgtgttttacaagcaattggtgcaggtatattaatgccattaggatctaatgtaattgttactattttcccacctgaaaaacgtggtgtggcaatgggaacaatgggtattgcaatgattcttgctccagcgattggaccaacattatctggttacatcgtccaaaattatcattggaatgttatgttctatatgatgtttatcttaggattacttgctttcttatttggattagcatggttcaaaatttatcaaaaaacaatcaatcccaaagcagattatcgtggtatcgtatatagtacaattggatttggtgctttattatatggctttagtgaagctggtaataaaggatggggttcaactgaaatcattataatgtttataattggtgttgtgttcatcatcttatttgctattcgtgaattaacaatgaaagcaccaatgcttaatttagaagtgctaaaatcaccaacatacacgcttactactattataaatatggtagtaatgatgagtttatttggaggtatgattttattaccattatatcttcaaaatttacgtggtttctcagcattagattctggtttactattattaccaggttcattattaatgggtgtattaggacctgttgctggtaaattacttgatactattggtcttaaaccacttgctttattcggtattgcagtgatgacttacggaacatatgaattaacaaaactgaatatggatacttcttatcttcatattatgagtatttatgtaatacgttcactaggtatggcatttgttatgatgccgttaatgactgcagctatcaatgccttaccacctcgcttaatttctcatggtaatgcgttcttaaatacgatgagacaattagctggttcaattggtactgcaattcttgttactgtaatgacaactcaatctacaaatcatcttaatgcatttgcaactgaattagataaaactaatccagtcattcaagatcatgtacgtgaaatggcagcgcaatatggaggtcaacaaggcgcattacaagttatcttgacttatgtaaataaattagcctcaattgaaggtatcaatgatgcgttttggattgctacagcattaagtgtcttagcattcattttaagtttattcttaaaaggtaaaaaaggtgctgaagctgaacatgagagattgatgagtaaagaaagtaataaattttaataaataaaaaaggtattggacatataaaacgttcaatacctttttttattttattaaatataaaatgagattacatttctatttgattctaggatgacgatttctaaagaaaaagcttataaataataacgctaaactacttgaaagtaagatcagtgcattgtgaatagcatctgcttcagtaataatttgatttggtggtaaatctaagaaaaagtgatgcaagttctgagagatttgctttcctaacatttgaattgtataactaaaggaaaaagcaatcattaacgcaacagcgataatgatgaaattaatcacttttaaaatcgttctattaaatacaatggttaaaattgaaataatcatgctgccaatacataaaacgaaaaatatattaaaggctagaataaatttatcgattacaccttgtaagttagcgacttcactaatattaatattgagtggtccaatctgagtagttgtattttgaaaatttttaatctcagagaaatcaatcgcttgatttgcaagaacaaaatttagaataggttgtttatacatgctataacaagtaatccctacaagtataagaatgatgatatgtataattaaacttatccacgaatttttctttttaccataataagcttgttggttaacacgagcatatggggggcggtttgtttgatatctattaggattttgcattattattactcctttgccgtcattcatttgttttctatagttgactcatttatactgaatttaatgtgtaataggcaattatatgaactagattgctcatttttaatcatataaatagtattatatcgtttttttagctgtctgtaataaagtttgattaattttacaaatttataaggtaggtaaaatgttatgaaaacacgtatggtaaatagaattgttaataaatatttactacataatcgctcaattcagtttaagagtaaagacgagttcgaatcgtttatggagcgtagaaaggatattaatagagcgaaacataagcaacctcccactttaaatgtgaaagcaaatcttgataaattatctttaggagatatgcaagtgtttagatttaattttcgtcacgaaactaaaaagaaaattttgtatattcatggtggatacaacacattacaaccttctccattccattggagattaatggacaaacttgcacttaacactttatatgaggtcgttttaccgatatatcctaaagcaccagagtttcatcttaaagatacatttaaagcaattaataatgtatatgaatcgttattaagtgaagttaataatgaaaacattgttattatgggtgatggaactggtggagcacttgcactgagttatgtacaacaattagtagaaaatggcaaaacgttaccatataaaatatgtttaatttctccgatgcttgatgcaacaatgacaaatcctcaaattactgaaaatttggttgaaaaagatcgttttgttaatattcaaggacttcaaaatataatgaatgtgtggagcgataaagaaccattatcaaatcctttaatttctccgatatatggaataaaacaaggattgccaccaattataatgtttggtggtggtaaggaaatttattatccagatatgcaacgtttggcatatgaattggaaacttataatcaatctatacaattttttgagtatccaaaaatgtttcatgactttgcgttattcccaattcatgaatctcataaggtgattaaacaaattaataaggcaattcatgaataatgataaggactaaagtagaattgagttagattttactttagtcctatattttttatattgaatatttattgatttgcaataataattcactaataatatcatgctgacctttacaatgataataagtatcgagagattgtgccaaccttaagttttcttcgggttcataagttgtagtatgtaattctattacatttaaaagttgttgttcaacatcttgagaatatctttttagattagctattaaatcattttcatccgtagtcgttttaatttctctatctaatgtttctatcgcttgtttttgtccttggtaaaaactgatattaaatgttcgttgaatgagctcttgacttggtccattcataaataatgaacgattttcatttaattcaattaaatgtagtttaagtgtatcactaagatcaaataatgtgttttctaagatttcagaaatagtctctgtcattatgcctctcctttttttggaatgccgatttgatgtcctaatgatttaggccagcgctgatcatattgagaatcatagtatatttggatattagatttatagtgtgtggggaaagaagcaggtcggcgtgttaaacgattaatacccatcatcattatttcgcttgttgcagctaaagtttcatcatttttaaataattctaaaaagaagtgaacacgtttttcatcataatcataaatacgaacacgaactgaaaacgattcttcgaagtgtaattcctttaaataggttgtatgttcttcgactgtaaacgttgtataattaagcgcttctctttcttttaatgataaaccattataatgattaaattcactaataacttcactgaaaattgaattatattctgcatcgtgcatatgttggttaaaatcaacttgagaagataatacgcttttatgaataataaatggatagttcataatattttatcctttctttgaaattttataaaaatactttactaacacaaaataacacatacacaatatttaattcatggtagaatgataaccgtatggttaaataggaggaaacagaaagatgaccatgacaattcgatatcaaactaagaacgaaccactaactcaagttgaacagatcagtgatgtgcctaatgatgctactattgtgtggttggattttgaagaggcaacatccgaagaaaatgattttttgattgaaaactataattttaactatttagaattagaagatgctattaaaggggtaccacgagttaaatataaatcttatgatgattaccaatacatggtatttcatagtatgcataaagataattttactcctatagcattgaacgtatttctagacggaaaaacattaattacttatcatcaacatcattttgaatcgttaatggaagttgtcaagatgaatgctcgtaaacatgatccagatttagattgtgctgatatcgttatacatatccttgatatgatggtagataaatattttgattttgtttataccattgaagatgaggtatacagctttgaagatgcgcatgtagatgatacacatagtaaaaaagtaatggataatgtctttcaattacgttctaatcttataaaaataaaacgtgtattattcccaatgcaagaacttgtgaatacaattaagactgaaggtaacttaattgtagattataaacattcaatgtatattcaacatattgatgatcatattattaaacaaaataatattattagaacctctcaagaaatgacaaatgaaattcgagaaaattttgaatcttattcttcgtttagaatgaatagtattatgcaagtattgacactcgtgtcagttatattttctcctttaacatttatagtaggcgtatatggaatgaactttgaatatatgccagagttaaaatggcactatggttattttatttgtttaactataatgttactcatttcaattgcattaattctcttttttaaaaagaaaaagtggttttaatatagaacatagtttaaggaaagtaggttgttacatgagagatatccaaagagagcaaagaaaaaatgaacatgtagaaattgcaatggcacaacaagatgtccctcaatcagattttgaccgtatgaggtttgtacatcattcaattccaaatatcaatgtgaatcaagtggatttaacgagtcatacttcaaattttgatatgacatttcccttgtacattaatgcaatgacaggtggaagtgattggactaagacaattaatgaaaagttagcagtcgttgctagagaaacaggcttagctatggctgtaggatctacgcatgcagctttaagaaatcctaagatggctgaatcattcagcattgtacgtaaaacaaaccctgaaggcattatatttagtaatgtaggggcagatgtaccagtagataaagctgttaaagcagttgaattattagacgcacaagctttacaagtacatgtgaatgcaccacaagaattagtgatgccagaagggaatagagaattctcgacatggttagaaaatgtggaagcaattgttcaacgcgtaagtgtacctgttatcattaaagaagtaggatttggcatgagtaaagaattactacaatctttagtaaatataggcgtaacgtatgtagatgtgagtggaaagggtggcactaattttgtcacaatagaaaatgagcgtcgttcaaataaagacatggattacctttcaaattggggccaatcgactgtagaatcattacttgaaagtataagttatcaaaataaactaaatgtatttgcaagtggtggattacgaacacctttagatgcaattaaaagtttagctttaggtgcaaaagctgttggcatgtcacgtccatttttaaatcaagttgaacatgctggtattactagtaccattgaatatgtagaatcatttatagaccatatgaaatctattatgacaatgctagatgctaaagatattaatgatttaaaacaaagtaaaattgtttttgatagtaagttaatgtcttggatagagcaaagacatttaaaagttgaacgtggataatattaatcgcttttgaagaaggacgaccttttcaaaagcgattttttattgaatgaggtgttacttccatgtttcttctggtaatagacaatcggattttctcattctagagacatatggatttcctttaacagtatatcttaagtgtttttctgtccattcacctttatttgggatacctatacgtgcactttcttcaatctctctaggaaattttctattctttacatcaatagataaacaacattgattaattgttgaaccatctattgctctaggaatactaaatgctttagtccactttcccggaccatttgtaagttcgaaaccagatttatttcggttgattttcataccttcgataccatcttcaggttcaactgcacgtattaagacaccttctgggataccttcttcacgtgttactaaattaataagtaaatgcgtatgcataacatggccatatatggttccgccacgttcatataaagaagtgactttaggcgtttgtttcccaccaaatccatgtgctgctttatctttaaaacctaaataagcttctgtttcgacgatatagccactataagtttgtgtatgatcttgataactaattttaacgcctaataaagatttagccgtttcaattgttggtttatttacaaagtccaatataaatacctctttctttaaatgaatcatttggatgcttgtctaaactttttaataattttattatagtggaaaatgatagagttagaaaatattaaatgcattgatagagaatcaaaaaacatctaatagataacgtttacatttttaaatttatataaaacctatggaatattaattaaaaaagtgtaacaatatgtattgatgataaagtcaaagtttaaaagtaatagatgaaatttaaagcagtttgctacaatgaaactaacttttcaaaagttggtgaataaacaaatgatatattcaatttttatttttgtattatcaggtctctgtgaaattggtggaggctatctaatttggttgtggttaagggaagggcaatcaagttggttaggatgtattggtggactagtacttgtcttatatggtgtgattgctacatttcaagtgtttccaacctttggacgtgtctatgcagcatatggtggagtgtttattataatgagtatcatatggtcatttgtatttgataaacaaattccagataagtatgatgtcttaggtgctgttgtatgcattattggcgtattaataatgattttaccaaatagagcctgatcaagcgtgttgagagggagacgtaagtaatgatagttgaagtagagaatcaaaatcatggtatagatttaattaaaatagataatgacgatacgtatattgtatttacaaactatggagcacgaattgtttgttggaaatatcatgataataatattgtgttaggtaataaggtagaagcggatgaattttaccccgaaaatccatataaatttggagctactattggtcgatatgcaggacgtattgaaaatgcttcttttaatctaaacaacaaatattatcaattagaagcaaatgaaatgactaatcaacttcacggtggtagtaatggtttagatagacgattgtttgattatgaaatacaaaataatataacaaatattaaagttatatttaaacttcagatacaatcaaaagaggatggttatcctggagatatgatgattaaggttatacatacatatgatgttgaacatcgctggacgattgaatataaagcaacatcaaatgaagatacattattcaatcctacaaatcatgtgtactttaatctaaatagagataataatgtcattgataatcactctataataagtgaacaattaaaaatgtatcctattgatcagaatcatcttatttccagtcaacaacctattgatttattagaacgatttaatcatcgtcctattcaatttcaagatatttttaattctgaagataaacaaattaaagaacaaatccattttaataaaggactcgatcatccatttgatattggtcatcatcgtcttatcgttgaaaataacgagtttgcgttagatgtagaaacaacaatgactaatatagtgatttttacttttaacgatacatcagaatggaagagtgattttaatatttataaacctcattcaggtgtagcggtagaaacacaatacttacctaatgatattaataatgagggtaataaagctaaatcaattctaaaagctaatgttccattttatgcgaagacaatatatcatatttcagaaaaataactttatttttattcagaaacataccactatgacattaagtgatagaggtatgtttttatttattcattgctttttcttttaataatttcaatttttcaatacgtttaggagataagtaaggattattaatggcttgatttaaacggtctatattttcgcggtcattataataaatatcattcaaattttgaacagataagcgtgtaggagattcggcagttttaaggagtaataaatgatcttgttgctgcacataaccttcttttaaaacacgcatataaaatcctgttttaccggaggatgacatccgcttaactaaatgtttaataccatactttctttgaatcttccagcaaggttctcgtatttcagaaacttctacaattgcctctcctaattgatattgatttccaaaatatacatcattttcatcaaggtcaacgagagttaaattttcaccaaacattgcataatcaggtagtatattaatatcatttttatacattgaataattttccttactaaaacaacaaacagctttgtgtggaccaccatggtctttataagcttgttcatcctcactgaaccctgtataagataaccacatttttccagaaaacattgttttatttaaagcagaatgcattggacgtttttgatcatagtttaaagtttcaattttaccagttgaaatagcatataccggaatcatgttatgctctccttttttataatatctgttattttactatatttttaaaaagtataaaaatttttttgataaattaaatgaatgtaaaatagacctaggtattttaaaaaggctagtgtaaaataataaatgagtatatgaaaaggagttatagtaccgatgaaggatgcgaaagaactcaaattaatgacgacagatgatgcagtggctcaaattcaagataatatgattcttggaattggaacaggaagtacaattgaactattgatccctaagattgcagagcgtattcaacaagataatttaaatgttacaggtgtatgtacatctaataaaagtgaatttcttgctaaacaatataatattaatgtggttgatattaatgatattacttatataaatttagctattgatggtgcagatgaaattgattcagatttaaaccttattaaaggaggcggaggtgccttattcagagagaaagtcattgatgaaatggcaagaaaatttatcgttttagcagacgaaagtaaaatggtaaattacttaggtgaaaccttcaaattacctattgaagttgataaatttaactggttacttgtatctaaaaaaattgaagcatatcatgatatctcagtcgaacgaagaatgaatgaggatataccatttattacagataatggaaattatattttagactgtgaattaaaaagtaagatagatccttatcaattacatgaatttttaattcatctcacaggtgtgctagaaacaggttattttttagatatgacaacacaagcgattattggcactcaagaaggaattaaagtaattaataagaagtaaaaaagagaggaacatgtttaagttcctctctttttatttattagatttattgatatcattgatttcttcttttacatcatccactacagatgagcgtctatcttctgcatatttagaagatgattttaaatgatgatcaccgtcttggacttcagattcattagtctgtgtatgagtcacattattttcttgtaacgattgatgtaacgtttcttttttgtccaattcactattagatgtcttatttgaatcatctgtgtcatcatttacatggtctaaataattattaggttctacttcatctaatgattggtttgttgttttatataagataaagcgaatgactaaacttaaaagaatgaaaataataccaacaattgtcgtacttaaagcaatgactttcatagagaataagtcaccagtttcttcgctaaataagaatacttgagcaaatgtcattgcagcatggaatagcattgcaatataaatcgtacgacctttagttgctctgattaattcacccacaatcattgaaaacataaatgtatataagaagtgataacctgcatattgcattccatatgtcgtgttaatagtccaaatagaatacattaaacctacaatgattgaagcaaaaaatgtattgactttactttcaacaatattttgtaaatatgaacggaatccaaattcagcaaagaaagccatgaaaatatgaccaataataattgtaaatacagatactgataaatcattggcttgtaataaaataaaactatcagcaaatctattgaaactcatcattccaataataaaaataatgagcggtaaaattaacgcaagtattatacgttcaataactctaatatcaatagagaaattcaaaccagctagttgagtacgcttatttttaaatgcaataatacaaattattgcagcaataaatggcgctaaattattaatactaaacacaaaacgtttaataccaatagatgcttgaaagtctcgcaggattaaagacaatgccattgtaacaacgaaaaatacaaaaattgttaaagcccattgaaatcctgaaatacgtttcgtcttcatgtatgtaacctccattagggtaaccatatatatattctttccttaatattatacatattacaaggggataaataaattgtccattttaaatatcattaaaatgtaatagtattgaattatttttaaatttttgaaactaatatttaatgtctgaatcataaattaaagggtgaataatttaataaaaatgggtattgattgtataaaatatgttatatgattaaggtaaccttaaataattaggaggcatctattattatgtacagtaaaagcaatccaaaactatggaaaggaagagtagatagtcaaaatgatcctaagcagtttaagcattttcagaccgtcacatttgctaatttagaaaatatagaaaatcaatttgataaagttggtgtaggtttgttaggctatgccgttgataaagggatagaactgaatgaaggaagaatgggtgctaaaaaaggaccagacgaaataaaaaaagcttttgcccaattaccggatttaagtgaatgtgaatctcttgttgattatggaaatgtagaatatacaaaaggttctctaagtgaagttcaagaagaaatggggcgtttggctgctcgagttattcaacagcatcaccaatctttttttattggtggaggacatgatatcgcatacgcacaatatctagcaacgagacacatttatcctgatgcttctattggcattattaatatcgattcacatttcgagacgcgtgctgatgtacaatctaattctggtacaatgttcagacaaattttagaaaaagatgataatattgattacttagttttaggtttatctcaaggtagaaatacacgttctttatatgaatatgctgaagaaaaaggaattatctatgtatatgcagatgaaattttaaatgatttgtctccaaccattaaagataaaattgaacgttttattcatcagcatgaaacgattatgtttacaattagtatggacgccatcgatagtgcatttgcgcctggagtaagtgaacctactgtactcggattgaatcctcattctgtatttaatataggtaaacgcgtcatattaagtggaaaaacgtcttctattagtattgctgaagttaatccaaattatgatattgatcatcgtactgctcaacttgcagcgaattttattcaccattttatagagtagttattttaaaaatcgaagtgaacttttagataagagtagtccaccattctaagtaatggatatctactcttatttagttataagaaaagtttgataattatgatactatagactatacaacattttattggacttagagaaagggaagtgacattgatgacaagttttaacgacgttgtaaaatggagacgcatgtttcatcaatatcctgagttatcaaaatacgaatataaaacgacgcaacgtataaaagatatattaacttcatacaatattaaaatgattgacattccaatggaaacgggtctagtagcagaaataggacaaggagaaaagtgtatcgctgttcgtactgatattgatgcgttacctattcaggagcaagttagtcaagactttacttctactaatgatgaagtgatgcatgcttgtggacatgatattcacatggctagtatcttagctattgctaccaagttaaaagaagaagaagaacaattaaatggaagagtaaggtttttatttcagccagccgaagaacttggatatggagctaaagtcatggctaaaaccaatgcactagatgatgtacaagcgattattggatttcacaattatccaacattagatattggagaatttgcaattaaatcaggtcctattacttctgctgtagatcgttttgaatttaaaattcatggcaaaggagctcatgctgccaagccagagcaaggcaatgaccctgtaatggcgttagggcaattaattacaagtttgcaaacaattattagtcgtaatttatctgcctttgatagtgctgtcattacaataggagaagtgtcttcaggtaatacttggaatgttatagcagataatgcttatgttcaaggtacggtacgttcattcaaacctgacgtacaagattatattgaacaacgtatgcatgacattgctaaaggattagaacaattatttaatatagagattgaattaatttatacacgtttaccaggcgcagttattaatgacgtagagcttaccaaacatgctaaagaagcggcaaaaaaagtaggatacacagtaattgatttagaacatccatatacaattggagaagatttttctggtttattagagaatcatccaggggtatttgcatttattggatcgaatagcgaatatgatttacatcatccaaaatacaatccagatgaacgtattttagaaaaaatacctgattactttatagaactgatttatcaattattagcataatatttattagaaaatttttggaattatgatttaattactatttaatgtggtaaaccagtattgagtgattaaataggagatgattttaatgggtgcacaagatccaagaactaaatttaaagattctgattataaaaaacaagaacaagaaacaccaggttatcaatataaaatgtcacctaaaccagattgtggtgaagaatcatatgaaggtcatggtcgtttacaagattataaaatgcttgtaactggtggcgattcaggtattggacgtgcagcagcaattgcttatgctaaagaaggtgctgatgtagttcttaactacttaccaagtgaagaacaagatgcacaagaagttaaaaaagtcatcgaaaaagctggaagaaaagcagtgcttatccctggagatgtgagaaatgagcagtttaactatgatttagtaaaacaagcttataatgaattaggtggcttagacaacattactcttgttgcaggtcatcaacagtatcatgatgatattcatggatttacaactgaacaatttgctgaaacatttgaaacaaatgtctatccaattttttggactgctcaagtagtaactaaatatttaaaaccaggtgcttcaattacaacgacatcttcagtgcaagggtataaacctgctgcaattttacatgattatgccgcttctaaagcagcaattatttcattaacaaaaagtctttctgaagaatttggagataaaggtattagagtgaatagtgtagcgccaggaccattttggtcacctttacaaatcagtggtggacaacctcaatcagcaataccagaatttggccaagctactccactaggtcgtgcaggtcaacctgttgaatgtgtgggaccatatgtattatttgcttcagaagatggtagttatttaactggtcaagttcatagcgttactggtggtattcaaatcgactaatttagtaaaatgttaagtatactggcgagagatttttagaaatctctcgctttttatgttataaaggagaattaaaaatgaaagagattaatccaaatcaattatcagacattcaaaattataaattattaagtggttcagttatacctagacctattgcgtttgtaacatcggaagatgaaaaaggtaatttaaacggtgcaccatttagctttttcaatgtagtgaataataagccacctatgatagcaattgcagcacaaagaagtaatggtaagcgtaaagatactgctataaatattgaaaaaacaaaagaatttgttgtgcatattacagatgaattcaatattgaagatatcaatgagacggctgcacctttaaaatacgaagacaatgaattagaacgcacatcattgactcttatcagttcatctattatacagacgcctgctgtgaaagaagctaatattcgttttgaatgtaaattagatcaaatgattcaattaggtactaaaaatgatggtgctgatttaattataggagaagttgttatgtatcatataaatgaagatgtctattttgaggatagtaaaattgattttaatcagcttaaacccgtagcacgtttagcaggaaataattattctaaactcggagacacatttacaattgaacgtccagaatcataataatatgaattttacatgtaattgtattgacgatgatacatgaatcttgtacctttaaatataaattcaattagtattaatgaaagtaggttaaatatgggagaaggtaataaagggcatgcatgggcactactacctcttgtgctatttattgcattatttttaggaataggaatcgctactggagattttagtaatatgcctttaaatgttgcgataacgattactgtgattgtagcattaatgatgaatagaaaagaaaaattttcaaaaaagattgaaatatttacccaaggagcagggcattcaaatattgtcctaatggttttcatctttatcttagcaggtgcattttcaactactgctgaaaaaatgggtggtgttacgtctacagttaatttaggactatcactcataccacaaaattttattattgtaggattgtttataatttgtatgtttgtctctatctctatgggaacctcagttggaacgatcgcagcacttgcacctgtaggatttggattttctcaggcaactgatatttcagctatgttagcgatgggaacagtagtaggcggtgcgatgtttggtgataatttatcaatgatatcagataccacaatagcagcagtacgtactcaaaaaacaaaaatgagcgataagtttaaagttaatttttggattgttttaccaggtgcaattctaacaattatcattttatttttcttaacaaatggtgtacatgttgatcattctaagcaatatgattataacttagtgaaagtcattccttatattttagtgcttgttttagccgtcattggtgtgaatgttatcgtagttttaattagtggtactatactttctggaatcattggtcttattgatggttctttcaattggaaaggtttattaactgctatatcaaaaggaattattggaatggaagatattgcaattatagctttacttattggtgggcttgttggtcttattcaacataacggcggtgtagaatggttgcttaattttgtgaaatcgaaagtgaaatcgaaacgtggtgctgaatttggtatcgctagtcttgtgagtgtagcggatatcgctacagcaaataacacaatttcaattattatgtcaggaccattggctaaaaatattgccgacgagtatgaagtagatcctcgtaaatcagcaagtcttcttgatatttttgctggatgttttcaaggtctgttaccctatagccctcaacttattgcagcagcgggtgtcgctggaatatctccttttagtatgatgccatattgtatttattcaattttattaggcatttgtggaattctagcaattgtatttagatttccacgtcttaagacgaaataaatgatatataacaagttaaaatcatctaaatttatatttttttaatttctgatagttgaaattttggtagtatttataaatgcgttaaaatataactaagagtgaaagtaggtgagatgagtggcaaaatataatgtagaaaatgaacaagttgagattcatattgagcgtttatttaaatattctccagaattggtttatagtgcttggacagatataaacttattaaagcaatggtttatgacctcccaacgaacaaataagttatttgatgcagatattcatgaaggtggacaatatcgtatagtagatgctcgtaatggtaaacaaaatgtaattcaaggtaaatatgaagaattagtatccgatgaatatatcaaaatgactattggaatgccagaattaagcgatagtcaagatgttattgaagtagaatttgaagagcgtgaatcaggcggtacgcaaatgttcttttactatcaatctatagtagaaaaagaacgtcgtttaacggctttagaatataaacataaaaagaaagaatatcatgattctactgcacatggtttagaattaatgtttgatcgaatgaatgaagttttagatcaatatgtagaggacaatgatatgttactttaattaaaatgaaaagacctattgagtaagagtaagttattacttaataggtctttttatttattataattcaccgttttcttttcgctcattatattttcttagtagcgtttcaaagaagatatgataattaataaagctagaataatctatatcattgtataaataaaatgtatgactagaaacgtaaacattataatttgccttttgtgctaatgtattgtctttcatggttgtaacagaaataaaataacgttggcgcaattgaagtaaattagtaatctcagttaattggtgagtttctccagataaagaaatcacaaaaaataagtcatcttcattagagtagttaagtaccattttaatctcatgttcatcatgcaatacaattacatttttatgcatagttaataagatacgttgtgcctcttcagctacatttttctgagctcgtccagtaccatataagtatacattggtagctttatcaattttttcagtaataaggttaaaatttaccctttctaggtaagtaaatgttgtttcaatttcttgtttaaattgtttgattgaatcggtaggaacttcatgtaaagattgactttcaaattttaaataagatttaaaatcactatagccatcaaagcctaatttacgggtgaaacgatgaatcgttgcgtttgatgcatgtgtatattgtgatagttcttgtatttttaaagttttacattgttctatatgtgtattaacaaaatgagctatatgaaggtcattgtcatttaatttatcaaagttagcattaactctctcatctaataacatataaacacctcaagttataatattgaaaattttttcatctatagaaaatataaactgattatacaaaaatatttcaaaatgagtcaatgccattgtatatatgaaagcgtttactataatagaattaagatattaagaaagcgcttaaaaaagtgcaatatcatatgattaatgatgatatttagatttgggggtcagcatatgaacgcaataaaacgttttgggagcgcaatgatagttccagtattaatgtttgcattcttcgggattatattggggtttgcaacactatttaaaaacccaacgataatgggtggtttggcagacagtcacacattttggtttaaattttggtcagtcattgaatctggtggttgggttatctttaatcacatggaaattgtatttgtagtagggttacccatttcacttgctaaaaaagcaccaggtcacgcagcattagcagctttaatgggttacttaatgtttaatacatttatcaatgccattttaacgcaatggccacatacgtttggtgcaaacttacaaaagggtgttgaaaatgttacaggtttaaaagcaattgcaggtattccaacattagatactaatattttaggtggtatcattatttcagctattgtaacttggatacataatagatattacagtaagaaattacctgaaatgcttggtgttttccaaggtttaacatttgtagtcactatttcattctttgttatgttactagtagcagccattacatgtgtagtgtggccaacgattcaaagcggaattgaatcattacaacacttcattattgcttctggttatataggcgtatggttataccatttcttagaacgtgtattaatacctactggacttcaccattttgtttatgcaccaattgaagtaggtccagttgtagcaaaagatggtttaaaagcagaatggtttagacatttaaatcaatttgccgaaagtagcaaaccattaaaagatcaattccattatggtttcatgcttcaaggtaatggtaaagtatttggcgcaattggtattgctttagcaatgtattctacaacacctaaagaaaatcgtaaaaaagtagctgcattattgatacctgctacattaactgctgttgtagttggtattacagaaccattagaatttacatttttatttattgcaccattcttatttgttattcacgcattattagctgcaacaatggatacaatcatgtatggttttggggtagttggtaatatgggtggaggactgcttgactttattgcaacaaactggattccacttggacaaaatcactggatgacttatgtagctcaagttattattggtttaattttctcagcaatttacttctttgtatttagatatcttattttaaaatttgatattccattaccaggacgtcgtgctgaagaagaagtgaaactattttctaaaaaagattataaagagaaaaaaggagaagatagtacagatacttcaggttttgagcctagtaatgaatatgaagaaaaagcatattattatttagaaggtttaggtggaaaagaaaatattaaagatgtgacaaattgtacaacacgtttacgcttaactgttaatgacgaatcaaaagtagaagatactgcatattttacacatcaacaaatgtcacatggacttgtaaaaagtggtaagaatgtacaagtagttgtagggatgaccgttccacaagtacgagaagcatttgaacacttagtgtttgatgaaaatgataaaaaataagataccaaaagggtcgaaacattttgtttcgaccctttaactattctaagaaatacgtgcattatgtattgcgcgagttttgtatgtggctgataaaatatcaatatttcgacaagcaataaactgaatgagttttgagaatacttctggtttacaacatacgctagcacaattattgtttaatgtataagttaaatcatattgattagagaaatatgtcattatatcaataactttatctttaataaaagcatcttgtaatccatctatacataaattaaagcgtttagaagaagaataatgttgtccagaatccaataagatgtgtgtatttctagaagaaagaatttgataaatagaaatttggtaaaaacttaaaaaactaatgaaatagggtaattgttgtttaggtaagctgatttcaagggctggagtattgttatatttaataatgttgtattgaaatgattcgcaaaattgaacatttctgcaaattttcattaattgctttttagtcgatcttgattgcaaacctacaatatttagaatgtaagtttcaaatttatctatccacatgcaagaacctcccaattcttaataatatgtagtcttcatgtcattatcattcttaaaatgaaacacgccgttcccatatacagtctgattgtatcactctttattatgattatcactacgacttttgaatgaattttaatttaatatttttgtaatatattcgtaattctatttaaaagagaaaaaataaaaattttcatatttttaaatattctgataatttattgttttactttttctcctatgatactcttatttcattatttaaaataagagggtgaaattatgttaagtaaagtaagtgaatttgcaactaagacatttttattatggatgtttattgctgctattataggttttatatttccaactcaactagcgacgattggtcaattcgtcccgtggctattaggaattgtaatgttaggcatggggatgacaattaaacctagtgattttaaattagtttttaaagagccgaggtctgttattatcggagtaattttacaattcactattatgcctaccttggcctatactattgcgaaaatatttcatttaccagctgagttagcaattggagtgattttagttggatgttgtcctggcggaacatcaagtaatgtcatgagttatctagctaatgctaatgttgcgttatctgtagcgattacaagtgtatctactttattagcaccatttgtaacacctgctttaatttatttatttgctcatgagtggttacatgtatcatttttaagtatgctatggtcggtcattcaagttgttttattaccaataatcataggattcattctacaacttgcttccaaaaaagtaactcgagaagctactaaaattttaccaattatttctgtagtagcgatttcattgattttagcggctgttgttggagggagtaaatcacaaattcttaaaactggattacttatttttattgtagtcattttacataatgcagtgggctatttattaggttatgttttagcacatgtattcaaacttgatagaagagacaaaaaggcggtttctattgaagttggaatgcaaaattcaggtttagctgtgtctttggcaactgtacattttaatccactagcagcagtgccaggagccgtattcagttttgttcataatatttctggacctattcttgccaaatattggtctaaacgttaatgtaatatgttaaacttacctataatattaagtttaaaggagaaatatcatgtataaagcaatagtattcgattttgatggtacaattgtcgatactgaacaacacttgtttaatattattaataagcatctaattagtcataatgcaacaccaattacactcgatttttaccgtgaaaatattggtggagaagcaaaggatttacacgaatatttggaacagacgattggaaatgataataaagaaactatttataaagaacatcatcaaacaagcaatcaattagaaattaatcctacgattaaacaattgatgaaatacttaaagcaacgtcatattcctatggcaattgcgacaagtagttataaaaaggatatttttccagtatttaagagtttaggtttagatgaatatataaatattattgttgggagagaaagtgtagaatatgtaaaaccagagccagaactttatttgactgcggttcagcagcttaattattctccaacgcattgtttagctattgaagactctgtaaatggtgctacagctgcttttcgtgctggattagatgttatagtaaatacaaattatatgactcaaacacaagatttctcaactattccatatattggtaaagatttaaataacgaagaaattataaatcgtttttttgaaaagggtcatgtgtgaatgaaatgtcgtggcaattaattatcttctttttagctggacccattattattggaataggaaatcttattttaggtccaatatttaataaacgtattccttttagagttcgtatacgttcattcatgttaggatcaatgatatatcttatacttgcttttatagcgtatttctttttgttacaaggcaaattataaagtgatcgaccaatataacagtaaaaaggaacctttttctaaggttccttttttattaaataattatttttagaataattgtaaagactaataaaacaattaaaatcgcatcaatacctaccattacggtaaatctagtgcttttagatccttgagatttagcttgtttcattgcattataatttggtatgagacttaaaaataataaaacaataattaatattataccgatagtgactgacatatatatttattctccttttcttttttcaatccattcccatataaatcctgcaataatacctacacagattcctattaaaacaccgaactttggagaagataatactattcctataattaaaaagattataacagcgatagataaagtaatactaaattttattttacgttgatcagaattaaagattgaaaatacaattaagtatagtaagaaaaatgctaaagttgctaaaaacgttcgtagtataagcgaacttaccatgtgctgttgttcactaaaaaagttcagtaaaaagaacacaatagcaaaaataatagatatttttatatccttttttaataaatgctgcataaggttaaactcctttaagtctatataagcagtatagcatactgctaaagtatcaattaaatatattaatttagtaatatgattctcaactaaaaataactcaataatacaaatattaaattattcatttttgtaaaaaagtaaaaatattttaattaaattaatgaaaacgctttcaaaataatttaaaaaatatattttattttctgaaaattatagtataataacttcaataaggtaaaggatatgtcgactaagaaaacgtaataaatattttctaaagtttaaaagtatcgcaccttagtccaaatagagatggggtatttttatggataataatgaattacataggggactgagtgcacgtcaaattagaatgattgcgcttggtgggacaatcggtgtaggtttatttatgggggcaacaagtacaattaaatggactggaccgtcagttatttttgcatatttaatcgcaggaatattcttatttttaataatgagagcaatgggggaaatgacttatttaaatccaacaacaggttcatttgcaacatttgctagtgaatacatacatccagctgctggctatatgacagcgtggagtaatatattccaatggattgtcgttgggatgagtgaagtcattgccgtaggtgaatatatgaattattggttccctcatttaccacaatggataccaggcgtgattgcagtagtagtattattaatagcaaacttagcttcagttaaggcgtttggagaatttgagttttggtttgcaatgataaaagtggtaacaatcatattaatgattattgctggattaggattgattttttttggaattggtaatggaggacaccctctcggtatttctaacttatggagacatggtggatttatgccaaatggattagttggtttcttctttgcactttcaatcgttattggttcttatcaaggggttgagctaattggtattactgcaggtgaaacaaagaatcctcaagagaatattaaaagtgctgtaaatggtgttatatggcgtatattaattttttacataggtgctatttttgttatcgtttcaatatacccttggaatcaattagaaagtattggtagtccttttgtagctacattctctaaaattggtattacatttgctgcaggtttaatcaattttgttgtattaactgctgcattatcaggatgtaactctggtatttttagtgcaagtcgtatgatatatacacttgctcaaaaagggcaaatgcctaaaatctttacacgtgtaatgaaaaatggcgtgccattttatcctgtattaactattgcaattggtattttaatcggagcattattaaatgttattttacctttatttataaaagacgctgatagtattttcgtgtatgtttatagtgcatctattttaccaggtatgattccatggtttatgattttaatcagtcatattcgttttagaaaattacatccagaacaggttgaaaatcatccatttaagatgccaggaggctcaatttctagtgttatgacaattgtctttttactcattgttttaattggtatgttatttaataaagacacagttatttcagtagttataggtattattgtcttagcaggggttacagtgtattactttattcgcggtcaccacaaaaatgatgctataaaaagagtaaaataaggataaaactatatattaaaaaatctgagacatgcataaacgtctcagattttttaatgtttggatagtaaatccctaagttaaacatagactaatatcaagtttttcaattgtagaccgagaccctaacataaagccattcaaaaagaaagtcgacaaccaacgtaagttaggaatgaagtggaacaatgagttctatcccactccttttttactaatgtttaaattcaatttttgataaatatttgtgataattatctaatgaaatctttgactgtgttatatagtctaaagaatcgtgataattacgtgctataaagcggtaaaagataatatcaatcgtatataattgtgcaaataatgcagtcgtcgcactcatacacagttcgtttttataatcttcattatacgttaaaactaaatcagaatcttttgcaattgaattattgttagaacttgtaatagtaatcattgaaagattaaaatctttaacgacttttaccattgcttgtagttcgctctgttcaccactatttgtaataaaaacgacacagtcatttttattatgtgtagacaacattgtagtaagtaaatgtgtatcttgaactaattgaatattgagaccaatacgggataatttctgataaaattcaagggcacacacatatgaactcccataaccatatagaaaaatggtatgtgcctgtttaaatgtttcacaaatagcgtcaatagtttggtgatctataaaatgattactttgttttaacgacgctttagtttgaaaatataatttttgttttaaactttctactgattcattttctactaacttgatattatatggtgtgacttgtttaggaaaccattgcttaatttcatcgcgtatagctttaaaattttgattaattaatttttgactataacgattcatagtagatacactaatattaagctcatctgcaatcgcttcattagacattgaaactaatttatgtggagaatttaatatgaaacgtgaaagtttctgttcacttttagaagacgaagcgtagacttcatctatcctacttaaaatatttgtcatccaatcacctaatttattaaaagtttttctttcatcataaatagatagatgaaaatgaaaacatctctatctaggcatgtgaatacatcatatattacatctaaattcccacaaatatcgataaataactgtaaagtgattaagttaagtaaaggtttacgtaataggattaccgaaataatgtgatattctcccatcaatatgacattatttcgaagattaaaaaaatagtatgcagtttttacttaatattaatcaagcattattatacatactatcaattacaatgacaattcacctactaaacttatcaaaaaaataaggttattgataattattaatctgattataaactttataaatatgattttgacgttcttgcaaatcaacgattaaatttccatttttaaaattttgaagagggatctgttttaagtgagtcaccaatttattgtattgctcgaaacaatacatttgtgaatcagaacaatgagatgaaatactatttatttgattatgtttaaaatgagcacggcaatgagtaataaaattattgtaatctttaattcccaaagataaatgtgctatgtccataaaataataatatttagctttttctagtaaaattaataattgaattaaaatgtgttgatcgtatattaaggttttataatgcatggtacactcatcctttaaaagagaatgttaaggatatatggtgtgtaagcatttagtatttaagaatgaaagtgagaatacatcgaaatttcttcaatactcactatattcattattcattgtttttagtctgtagaaattccttatagttatgaatagtaatatcgtatgtttgaatctttttttcaaatgaataagaaatatcaacaatatttaatattgataattcacgagttctaccgaatccaatttcataaacaatagcaaaccattgaccgttacggcatagtaaaccgatgaatatcacattttctgcagtaatttcattattttctgaaaagtcaacaagcataacatgtctttcgttactataaattaaaatttctgaaaatagatgtggtaatgttagagaacgtgtatcttctaatttaatattattggagatatgtttcagtatttttagcatttgtgtattaggtgtttttaaacattgattcataattgaacgaatgtcttgagtgtaaggtaatgtagagtgagattgactttcttgcaaagttaaaaatagtgcaataagttcagattcatttaatttaagttgaaaataatgatcagtattttgaatttcatatccaccatgtcttcctttatgagcgtatatatgaacgcctttagattctaagtcattaatatctctagtaattgtacgggtagaaacattaaattgttttgctaaatcagaagcattgattttatgtccttgttgaattaatgacatcatttgattttgtctttccattttattcaatatactcaccacctatgaacattacatattacattaattataacataagaccgggattcaagacatttatagtaataagttgattataagtgtaaaaataaactatttttatttagaaaacgcttacaattattaggtgattatgctaatataatatttgtaacagggtagaacgatttcaaacaaaggggtaggggctatataacagatagctcaaggtgagtcgttcgggttacatcgaaacatcttcaatatttattacttactttcctttctattttgtcggctagcaaatgactagccgattttttattttaaaaaaataatatgttatatgataagatgaataaaaacgttgaggtgacatcatgcaaaatcaacaacttcaatttatagataagcatattacgaattggttccaacatttagatgatattattcctaatttaattaaaaatatggttacagaaacaaaagaaaatcgattcgatttagttacaaatgtagataaacaaatccaaaatgatttcgaagcctatcttgaaaagtattttcctacacatcagttattagctgaagaaaaaaataatgatggtattgaaccctatcagggacacctttggattatggaccctattgatggaacagccaatttagtgaaacaacaagaagattattgtattattttagcttactttgaaaatggacaacctaaattatcttatatttatgactacgctcataaaataatatataaagcaattgaaggtaagggagctttcatgaataatgtcaaacttgagtctccagaagtattatcgcttaaagatactattgtttcatttggttcagaatacgtgagtgaaaatttaagtaaagctttgtatcaatcgtcttttagtgtgagatatataggagcttgcggattagattcagtgcgagtaattaaaggacaatttggagcacattttaataccaatcctaaaccttgggatatcgcagcacagtttttattcgctaaagaattaggattagtgatgacgcaaatggatgggcaacatcttgatttcgctaaaggtggtccctttattattagtaataaagggtgctacgaggagatattagctattattaatgatgaacactaatacttctattcttagttatttgatatatttcctactaaagttgtatagtaaattaaatcatttaatatataataatggagatatattttaatataaatagaataggaggaggaagatgcaacgtcctgataagaaaaaacattcctctagtaaaataatgaaatgggttattagtatacttgttgtgttagctatcgttgctgtagccgttatcgcagcaacgatattgatcacaggtaataaaattcataacccgcttcatcgtcaacaatctgaattgcgttctcataatgttaatttaagaaatggagatccatttacaattgccttatttggtgttgactctaatgcacaacgtaaaagtacaaatgatggtgaacgtagtgatacaataatgattttatcagtgaatccaaagaaaaaaacgactgagcttgtaagtattccacgtgatactcaagcagaaatcgtaggaagaggtacaactgaaaaaattaatcatgcttatgcttatgggggccctaccatggctgttaaatcattagaaaaactaatgaatgtgccaatagatcactatgctactattgatatggatggattacacgacatgattgattcggtcggcggtgttaacataacgagtaatgatacatttacagttcaaggtacaacatttactaaagggcaatccactcatgttgatggagatacagctatggcatttattagaagtcgtaaagaaacaggtgcaggtggcgattttggacgtcaagaacgtcaacaactagttttacaagctatggcaaataaaatggtgagttcttcagcgattacacatttgccatcattaattactcaaattcaaaagaacgtcacaaccgatttaacattaggagacttaaatgaaattagaagtcattataaagaggctaatgatacagtgaatcgtcatcagctagaaggtacaggtagtattcaaaatgacggattatggtattttattcctaatgaaagttcaaaagggcaaatgacagaggtattaaataataatttgaaaaaataaaagattgatatagaatttaaaaaatctgagactcatttatatgtctcggattttttatttaaagatataaaaatttaagagtatatgctttatttaaaagaataaagaaaggtcaatagatagtattgaaagccttaacattatatgattttagttatacaataatattaattctgtattgaatatggggaaacaatacagaatcttaatgaaattggttgtttacggaatataattataaggtggggaaagcaatgcaagaacatttagttttaaccctagatgatgtggattatcttgtagaacctggaacaaatttactcgaatttattaaatctcgtgatactttcgtgccttcaatttgctataacgaatccatgggtccaattcaaacctgtgatacttgcatggttgaaattgacggtaaagttgaacgagcgtgtagtacagtagttgaccgtccgatgtcagtcaatactcaaaataaacgagtgaaagctagccaaaaagaagcattagatagaattttagaaaagcatatgctgtattgtacggtatgtgattataataacggtgattgtgagattcacaatgccatggatgcatggggattacaagaacaatcatatgaatataaaacaaaaccttatgaaaaagattatggtcctttctatcgttatgacccagaccaatgtatcctatgtggcagatgtgtagaagcatgtcaagatgtggaagttaacgaaacactttctatagactgggatcgtgagcacccacgtgtgatttgggataatgatgttccaataaatgaatcgtcttgtgtatcatgtggtcaatgtgcgacagtatgtccatgtaatgcaatgatggaagtcaatatggagggtaatgcaggatatttaactgatacagaaccgggttcattagcagctatgattgatttaactaaaaaagctgaaccaggagatggattgttatttgctgtgtcggattctgaagcagagatgcgcaaagaaagaattaaaaaaactaaaacagtatgtacatattgtggtgtaggatgttcatttgatgtatggacaaaagatagagaaatcttaaaagttcaaccatcacacgactctccagcaaataaaatctctacttgtgtaaaaggtaaattctcatggggacacattaattcggatcaacgtttaactaaacctttagtacgtaaaaatggtgaatttcatgaggttgaatgggaagaagcccttgatgttatagaagagaactttaagcgcattaaaaataaatatggtggcgatcatctagcatttatcgcctcttcaaaaggtacaaacgaagagtcatatttaatgcagaaactttctcgccaagtatttggttcaaataatattgataattgttcgaggtattgtcaagcacctgctacaaaaggattatttagaacggtaggacatggcggggactcaggttctattgatgacttggaaaaagcagctatgacggtacttattggtacaaatacagcagaagcacatccagttattgcttcaagaattaaacgtgcacagaaattgtttggacaaagaatgcatgtctttgatattcgtaaacatgaaatggctgaacgtgcagatgaattttatcaacctaaacctggtacagacttagtatggttgagtgctgtgacaaaatatattatcgatcatcatttacatgatatcgaatttattaaaaagtgggttgacaattttgatgaatactatgagtcgttaactccattttcattagaatttactgaagaggttacaggaatttcaaaagcgcggttaattagtttcgcggaagaatgcgcaaaagcagaatctgtagctatttgttgggcaatgggtgtcacacaacaagatataggtagtgatacaagtacagcaatttcaaatcttcttcttgtaacaggtaactatagaagacctggcacaggggcttatccattacgcggccacaataatgttcaaggtgcaagtgatatgggaagtatgccagatcaatttccaggttatcaaatgatacacaatgatgaaattagagcgaaatttgagaaagagtatggtgtcacattgaatccaacgcctggtcgtgataatcatcaaatgatggatggtattcatgaaggacaaattcattcactatatttgtatggtgaagatacaggaattgtagattcaaatattaactatgtacaatctgcattagaaaaagttgaatttttggtagttcaagatgaatttttaacatttacagcaacgtatgcggatgttgtgttaccagctagtccttcgttagaaaaagatggcacatatacaaatacagagcgtagaattcaacgtattaatcaagcattatcacctttaggtgactcaaaacctgactgggtaattttccaattgattgctaaaagaatgggctttgattggaattatagtcatccttcagaaattatggacgaaattgcacgcttaacaccttcttattcaggtgtcagctatgaaagattagaaggttttaacagtttacaatggcctgtagcaccagatggtatagatcaacctacattatatcttgatggctttaatttcgataataaacgtgcaaaattatttaaattaacatttgataatttctttaaagaagatgaagtatatgatttacatgtgaataatggtcgcgtactagaacatttccatgaaggaaatatgacatatcaaacagaaatgattaaatataaaatgcctcatgcatttgtagaaatttcacctgaattagcaaaagatcgcgatatccatgagggtgcagaagtaaaacttatttctgatacaggagaagctactttagttgctacaattactgatagagttaaaggaaaagagatatatattcctttaaataatgatgctatgagtaatggtgatataggtgctataaataaattaactaatagtgacgcggattatgctacacacacaccatcttataaacgtacacattgtcgtttagaggttataactagaaaaggtaaatctcctttaaatccaacgaatttccgtgtagataaacatcgtcatccacaatatagtgtccaagttcagaaaaaatggaagcgtaaggattatattttcccgggaaatgtggtggattaatatggctgaaagaataactaaaattaatcgtcttgaaaaatcaaaggaacaacttaaattggaaagtttgaatgaagttacagatgcaattgttgaaaataaggatagtattttaaaagctattcgtattattaaaaatttagatgatgcaaaactcttagatgctattaacggtggtattaaaggtcgtcaagttattataaataaattcgctacggaattaaataaagatatgtatactggactgattacaaatttagctccaatggtatttatgcttggaaatctagaagttaaagaactaagtcaatttttaaataaacttaatagtggcttacacgtagctaatcaagcaagtccaaatgccaaaatgacgatacgaagcttaatgagtgtattaaaagatgatgatatgaatcgtagcttaacgtacatgctaaatttacttaaaggcatgtctagaaaataaattgaatagatacgactccttaatataagaatgagatgacttatgttaaggagtttttttagaaatgaatttgtaaaatatagtatacatctattatgataaagtagagtgtataaattaaagtgtaaggagagaggacttattcatccaaatattattaaaataatgactattatttctaatatttttgttatattaggaattatatttttaattatgatgaaattaatgttagcgatagcaatgtttgccgtttcattggcaattagtcttgttatttttaatgtattatttcgagatcgtacgggcatgaaaattattattaatatttcgtttgccatcgtcgttattgctattatagttgcatacagtatgttatctaaataagacaattagaggaatttcaatttatgaaatatagaaatagtaatcatttacgtttatctattatactttttatgtttattctcatcatattgattgtattactttgtatcaatcataaggatatactacgtaatgatcgaagatacagttttcaagaggcctttcaaaagcaaacccaatcaaaccaattaaataccattgataaaaataatcagtttgttctagcgaataataatgaagtgaaaagagcaatgagtatttctaaaaaagataatgatttaaaatatatggatttatctaaaacggttccaatgaatgaagatgaggtaaaacatatacttaaaaataaaggtattttaacagatcaggcccaaacatttttaaaggcccaagataagtaccaagttaatattatatatttaatgaatcatgcaataatagaaacagcaaatggtcaatccgaactggctaatggtattaaagagaataatcataaatactataatttttttggaattggtgcatttgatcaagatgccattgctactggtcatagttatgctaaagagcatgattggacaacaccaagtaaagcaattatgggcggtgcagcttttattcgtcatcaatattttgaaaacgaacaaattacgctttatcaaatgagatggaatcctaaaaatccagggtctcatcaatatgcgagcgatattgagtgggcagataaaattgcagataatatgaaaaaagattatgaacgtttgggtataaaaaaagataagatacgtaggaattactatatatctaataaatagagatattgaggtgtaatagaatgaaagttgcagtgataggtgctggtatcggaggtttaacggttgcagcccttttacaagaacaagggcatgatgtcaaagtctttgagagaaagactgatattaaagaagtaggtgctggtattggcatcggtgataacgttttaaaaaaactcggtaatcatgatttagctaaaggtatcaaaaatgccggacaaaatttaaaatcattaaatatctatagcgataaaggcgacttgcttacatcagctaaattgaaagagggaacattaaatgtgacgttatctcgtcagtcattaatagagttaatatattcatatgtaaaacctaatactgtatttacagattatgaagtgactaaagtggatgttcaatctgaactgccaatgcttcatttctcaaaacatgcaagtcagacgtttgatttatgtattggcgcggatggtattcattcagctgttagaaaagcattattcccagactctaaagtgatttatcaaggttatacgtgctttagaggaatgatagatgaagtggacataatgaatcaatatacagcagatgaatattggggaagacgtggacgcgtgggtattgtgcctctaatcaataatcaagcctattggtttattacaattaatgcaaatgaaaaagatcctaaatatgtatcatttgaaaaaccacatttgcaggcttattttaatcattatcctaatcaagtgagagcattgttagataaacaaagtgaaacaggtattattaaaaacgatttatatgatttaaaacctttaacttcatttgtacatcatcgtacagtcttactaggagatgctgcccatgcaatgacgccaaacatgggtcagggcgcaggacaagcaatggaagatgctatcgttttagctaattgtattgcttcttatgacttaaaaaaagcattacagcgatataataaattacgtgtaaaacatactaaaaaagtaataaaacgctctcgaaaaatcggacatatcgctcaaaaagataataaactagttgttgcattgcgcaattctatcatgaaacatatgccaaaacgattttttagtggtcaaactaaatttttatataaaacaaaagataaataaggagtgatcatagaattcactatggattctatgatcactccttattattttatttaatattattttttattaacaacaaattgcggttcttcaccattcaattttttaattgtatcattagctacaattttagacatcatttcacgagcttcaaacgtagcattaccgaggtgtggcgtaatgactacgttatctaaagatttcaagccttcagtaatatctggctcgaattcatacacatcgagagctgcaccttcaatatctttatgtttcaatgcatcaacaagtgcctgttcattaacgattggtccacgtcctgcattgactaaataagcagtcgatttcatttttttaaattgttctgaatcaatcatatggtgtatatctggattgtaagcagcgttgattgtaataaaatcagagtgttctaataatgtatctaaatcaacgtatttagcaccaatttcacgttctttttcctttttttggtgaggacctgtataaaggatatccatatcaaatccttttgcacgtttagctactgcactaccaatttctccaaatccgataataccaagtgttttgcctgagacttcacggcctctaaagaataatggcgcccaaccatcaaatccttttgtacgagaaagtttgtcaccttcaacgatacgacgagcaattgctaatactaaaccgaatgttaattcagcagttgcagctgtagatgcttttggtgtatttgtaacatcaatatttttttcacgtgcataatctacatctacattattaaacccagcgccataattggcaataattttaagattttcaccgctgtcaatcacttctttatctacattagtagataaaatactaatcaaagcagaagcatctttgacacctttttttaatgtttctttatcgatgatatcttcaccttcatacatgtctacttcaaaatgttctttaagtagatttaaaccagcttctggaattttaccagctatatatactttttccatccatctcactcctttgtaatctttcaaattaagtataatggaagaaagatagggacacaaagaatttatatgaataaagttattgtattatttttaaagcaattacggatattaagattaaagcaatacaaaatatacgaataaatttttttgattcattatagaaaatcatacctacaatggtacctccagcagtcccaatccctgtccatattgcataggcagttcccatcgaaatcgtctgcatagatagttttaaagtactaaagctaaatataaatgtaagcgcacctagtagaatatatatttttttatgtgtacgattcagttcatttaagaaaacaacacctaaaatctcaaagcatcctgcaactaaaaggtataaccacgccattttatagacctccttcagattggtcatcagtagaaatctttaatccgataatacctataattaataaaataataaataataatttcataggtgaaataacgtgattaataaataacatatcaacaatgactgttcctgcagcgcctataccaacaaaaacagcataaacagtacctactggaagttgttttgtagcagaaagcattaaataaaaacttaaagcaataaataataaagtgataagccaagtaaacgtattatgagcgtaatttaaacacgtaacccaaacaacttctatcaatccagataaaatgacctttaaccattgcattacatccattactccttatagtatttttgataagtaaaaacattttctcagacaattatgagttatgcaattttagaaaatagaaaagtgagaaagaattcattgtgaattcattttctcacttttaaattaatgaaaatataatcttaaaggtgatattaaacggtaatatatttatattcaagttatatcaatcttagatatttatgataaatgaatataattataagaacttacttcgcttgctgaaattgtacgtgtatccgtcacgtaggcgccacctgtataattcatttctgaaattgtaattgatccatcactatttacactttctacataagccacatgtcctaaacttcctgctgtggtttgtaaaattgaaccagctttggcatgatgattaactgtgtatccagctgcttttgcagcatttgcccagttatttgcattaccccatgttgaaccaatagcaccattcactttgtcatatacataccatgtacattgaccagcggtgtacaagttgttcttagttgaagatgttgtcttagttgatgtactcgttacacttgaggaatttgaagtagatgaactactagatgacgtagtatgagatacactatttaatttattcattgtagatgtggcgctagctacatcttctgtagtatgactggctaaatgtagattaggatttgtatgattgtttgagtaaatagtattagtgaaatgagaaggtgcttgcttgttagtgacgatttttttagattttgcttcattatagtgaattacattttgattttgcttttgttgattcaaatgttgagtaggttgattttgtgcgttgtagtttgattgaccaaaatgatatctttgattatttagatttgaatgattaatttgacgtgcttgatgtgctatattagattgacttgtctgttgatgattatagccttgcttttgaagttgattctgattttgttggtgatttaaattttgttgttgttcactattattatgttgtttttgttgattcacttgttgagtagcttgattttgagttaattctgctgcatctgcatgatgtatatttaatccaaaagcagagactccaattcctgctgtcagtgttgataatgtaattaattttttcataaataaagtcctcccaaatactattcaacaataggataattttagcgatatgttgaatatgttttaacattaacttgtcgctgttaacgataagtcatactttatcagataaaaacatgtagtagggcattgttactttaccgtaaatgaaattcaaaattcttgtacaacgatgtaataaaaatctgtttaatatttcttaatgaaatatttcttgcaaactgcatgtttgctatacattttctaattttttgaaaatattaatagaatttatattacagcaccttgtaataaacttattttatataaagatatatacataaaggataagcggttacatttatggagatttatttgatatcatactactaatagtgtttgtaaaaatttaaattaggctatagaataaaataatactattttgaagatgcagtatttatatctgcatctttatttattgataataattttttagatgactattaaaaattctaaatagagaaatgaggaatgataactatgaaaattgcaatagtaggatcaggaaatggtgcggttacagctgcagtagatatggtcaatcaaggacatgaagtcaaattatattgtcgaaattcatcaattcacaaatttggtagagcgttagaaaaaggtggatttgattttaataatgaaggtcatgaaacgtttgtaccttttacaaatattagtgatgatattgaatatgtattaaaagatgcagaagtgatacaagtagtgattccttcatcttacattgaatattatgcgaaagtgatgtcccattatataacggcggaacaaattattttctttaatatcgcagcagctatgggatcaattcgatttatgaatgtattagaagaacgtcatattaatattcaacctaaatatgcagaagctaatacccttacttacgggacacgtgtagattttgaagaggctcgagtggatttatctcttaatgtaagaaaagtctttttctcaacatacaataagagagagttaaatgaatgttttgataaagtgagccaattgtatccacaattagtaaaagaagaaagtttgtggaaaacgaatctagaaaatggaaatcctgaagttcatccagctcctacactattaaatgtaggtcgtatagattatgcagatacatttgcattatataaagaaggtatcacaaaacatacagtgcgacttttacatgctgtagaattagaacgtctaactttagggcgtaaattaggatttgaattattaactgctaaagaagcgcgtattcaacgaggttatttagaacgtaaagacgaggatgaaccgctaaatcgtttatttaatacaagtcctgtattttcacaaattccaggaccgaactctgtagaaaatcgttatcttactgaagatatcgcatatggacttgtattatggtcaagtttaggacgtgaaattggtgtagatacaccgaatattgatgcgataattaccattgcctctactattctcgaacgtgatttctttaatgaaggactaacagtagaagaacttggtttagataaattaggattaaaataagtataatgtttggtatagaaaagaggtcttaagaaaaaagaaaaaggagcagatatatgaaaagaaaatccacatttctagaagcaatatctacaattattgtcatggtaatagttgttacaattggatttgttaaattcaatatccctattcaagtattgttacttatcgcttcaacctacgctgcttttattgctatgcgtgtcggtttaaaatggaaagacttggaagaaggaattacacatcgattgacaacagctatgcctgctattttcattattttggctgtaggtatcattgtaggtagctggatgtacgcaggcactgtacctgcattaatctactatggacttaagtttttgaatcctagttattttctaatttcggcatttatcatttcggctatatgtagtttagcaaccgggacagcttggggatctgcatctacagctgggattgccttaatatctattggaagtcaacttggtataaatcaaggaatggcagcaggtgcaattattgcaggtgcagtatttggagataaaatgtcacctttatcagatacaaccaatcttgctgcactcgtaacaaaagtaaacattttttctcatattagagcaatgatgtggacaaccattccagcatcaatcattggacttatcgtatggttttttgctggattaaactcccaaggtaatgtaaatacaaagcaaataaaagaacttttaaatgaactagctagtatttataatattaattttttcgtatggattcccttaattgtgattatcatttgtttaatactaaaaatttcaactgttccatctatgcttgtttcagcgttgagtgctattttgataggtaagtttaataatggatttaaatttgtagatggttttaaagcaacgtttgatggctttacatcatctatgactggtcattctcatgtcaccgaaaatgcaaaaacattgattgaacaaggtggaatgatgagtatgacacaaatcattgtgaccattttttgtggttatgcatttgcaggtattgtagagaaatctggttgtttagatgtaatgttacaaactgttgcaaaaggtgttaaatctgttggtaccctcgttcttattactgttctatcgtctctaatgttggtatttgctgctggtgtggcgtcaattgttattattatggttggggtacttatgaaagacatgtttgaagatatgaatttagatagaagtaatttatctcgtacattagaagattccagtactatggtcctaccattaattccttggggaacatcaggtatttactatgcgcaacaattaggagtttcagttgatcaattctttatttgggcagtaccatgttatttatgtgctatattagcaattatttatggatttactggcattggaatacgtaaaaaaataaattaaatgattaatttgctgtttaattcccctataatatggaaataacaaattaggattaaagtattgatgagaaacatagtagcgatgttatttaaaaaatacattaattttagatatcctaaaaaatgaattaaaagtggatttaatttttgtggcgagaattcaatccataataatgaatttgattaatatgataacttaaagcgttcgaaacactaaattaaagtaaagtttcgaacgctttttgtattatgcataaaaaaaagatttagaattcatattgaattctaaatcttttttctttatcaatttaattaatgaatgaaattatatgaagcagcttcacttgaagaaagtgtacgagatgttactacacctacaccatgaccataattcatttcagacactgtgattgaaccattactatttacattttcaacatatgctacgtgaccgtaagcaccagcagtagattgcataattgcacctgcagatggacggttatttactgtgtaaccagcagatgctgcagcatttgcccagttatttgcgttaccccaaatcgaaccgattttaccacctacacggtcatatacataatatgtacattggccagaagtgtagtagtttctacctgagctaacagagttagaaattgaaacacctgttgatgaaggtgcagttacagtagttacttttacattattattagaagtagaagcagcacctaaaccaccagtttgttgattacttgttgtgtaagattgtgttggattactagcaacttgatttgagttattagtattatagttgttataactataagttgaatttgtattagaataattattatatgtattgtagttataattgtaattatagttagaatgatttaaacgatctggactccagttacctttccaagtgtaatggtagttaccttgttgatcgatagtgtaagagtagctatatgaagtaggatcatttggattatatccttgttcagctgcatgagcttcatgtccttgtccggcgatagcaattgcggcaactcctgcagtagcgattgtagctgtagcgatttttttcattataaatttcctcctgagaattaaattaatattattttatatttaatagtcatttgttaacttagtctttaaatcattttacttaacgacaagaaatactttatcaaaaaaattacaatttgtggggaatgttaacgatttgtaatttttcgataatataaaagcttgtaaatttaattcttagtaatattttttaatataaaaaacgctattatgacagtatttatagaagaatatgaaaaagacatttattttcttgtaatctttttgtaaaataatagaaaaataatttataacaaaataatttagcctattgaattattacttgattaaataaatactaaaaaattattttatatgtcatccttatatataaataaagtaagtttatattgaaaaacaataaaatcatactataagataataaagtgataaaataagtcaaaatattgctactgctaataccgaaataaaacataaaattgtatatgaagatagatctccgatacgcatacataagtatcgaggcgataattcaatagaattaagtggtgaataaaggggagaaatgtcatcgcttatatctagtctttatattacaaacgagaggaaagacgtatgatagataatttttcggtaaagcttttaaaaaatacgagaatattaaaacaaaaagaatccaatatcaaacttatatattggttaaagggttctggaaaaataaatttagacttagatacatataatatgaaaaaaagagatctcgtatttattatgttaaatgatttatattcgatagaaggcgaaacgaactctgttattgcaataattgaaatttcattcacagattatttaagatttgcagacgattatattagacaaaaaggatataaattttcttctattgaacgaaaacaattagaatcatttattattaatcttcttgaatttgaaagtcgaaaacctcgacttccacacataagggataaattagttaaacatttatgtgtagaattaggttatattcaaagaaaacatcgtcaaaactataaactaaacaatccacttgtagatgaagttcatgaatatattatcgaacatcatcatgaaaagattaataaacaagcattagcgaattcacttgatatgtctaacaaagagttaagtcaagtgattaaatttcatacaccttatcataatattgctcaatatattaatgatattcgtttgaaattatgtttacttgatattttagatagtagtgaatttattcaagatattgcttataaacatggatttaatcattttccgagatttattgcattatttagtaagaaatatgggatgactccaggtcaagcacgaaaaaaacaatttgctccaatatataaggctaccgaaacggttgaaatatctttagattatgaagcacagttacttatagctgaggccaaaagtaactatcatacctaaaataggattaagtccattaataagtaaaaagataaagtatttagacctttactcatacttaatatgaagtaagtatatgtatgatataaagataaactggtaacactttaaaattgtatcgcaatactaaagtctgtcttctagaattgttgtataaattgcgaggtggcaactatcatgacgaaaaatgatatggatgtactattattttatcttttattttacaaagcagtcgatgaacttttaaaatattctaaaaacctaaatattgaacacctaaatgtactatatgctattattgattatcataaaacgaagcatcaaggtatggatattgaaacattaatgaaaaaaacgtatttatctaaacgaactttattccatcttgttagtcatttataccacgaaaattggatttttaaatcttatgatgcaaatgatcaacgaagattaagaatcttacctgtagaagtgtatgaaagaaaaatgaatcatttattattagaaattggagaattacttgaaaataactatcttaaaacatcaatcaagaatatgaattattgtaagttaacatatttaattactatttataaagttttaaataagattgaaaaaagtattaagcactatcagttaagtttaaatgatttgcttgttttaggcattatttggtcgaatcaaaatgacatctcgttgaaatcgataaactatttttcgcgttgtcagtctataaatataaatttagtaattaaacgattacaacaaagtggttatattttgaaagaaagagatgttatagatgaacgtagagtgtgtataaagttaaatatgtcaaaaaaggaagagattcattatatcttgagacattgtagtaaaatgataaaaaaggaattaatattataatttgttctaaaaataactagtgatgtaagaaagtcttgtctcttacattactagttattttaggtgtataacacatgaaataattatgtataatttaatttggcaaatgagattttaatatataatatcattttaatttcataaaaatattgaaatattatacttaaatgttataaaataatttttatagcataagaaatgtttagtgttgtagtagttagtatacatgaaccttgtagcaactagatgtacatcagaggagtggtttagaatatgggacaaattaaagacatcaatgatttagttaacgcaacatttcaagtgaaaaagttttttaaagacactaagaaaaaatataatctgaattatgaagaaatttatattttaaattatattgttaaaagtaaaaaagatgaaattacttcaaaagaaattgcaacgtattcagaattcaaaccttattacttaactaaagcattacaaaaattaaaagatttacaattattatcaaaaaaacgtagtatacaagatgaaagaacagttattgtttatgtaacaaaagagcaacgcgagagaattaatgctttaattgctgaattagagaaatatatacaatagaatgatgatggggtaaatgagtgagacagaatttctgtccactcttttttaattctaatatactatgttaatgagatactttatattattaaaaccgagtgttaaactatgattaaatatatcaaatatcgaataggtgatagtcatgttagattcatttttaataagtagtgatattcaaagaaaatggattaaaaaatttaaaacaattgaagatacatttaaacaaagagcagcagaagaagatattgactctaaattcccatttgacaatataaaatggcttgtagaggaaggttatagtgtgttaactttacctaaatcatatggtggagaaggtgcaacaatagaagatatggtcgttttacaatcgtatcttggagctatagatggtgctacagcactgtctataggctggcatctaagcgttgtaggacaattatatcaacaacatatgtggagtcaaactatgcttgatcaatttgcaatagaagtaaaaaatggtgcgcttgtaaatagagcagtaagtgaagcggatactggtagtcctactcgtggtgggagacctgctacgcatgcaataaaaactaaagacggatataaattaaatggtgtaaaaacgtttacttctatgagtaaagcattgacacattacattgttgctgcatttgtagaagatattcaagaagtaggcttctttttaattcctagagagactaaaggtttagaaattgcagataattggaatatgttaggaatgcgtgcaacggaaagtcatgatttagtattaaatgatgttatagttccgtttgaaaactttgtagaaacgaaacataaacctcagcccaatggatggattttacatataccaagtgtatatttaggtattgcccaagcagcgagagactatgctattgagtttgccaaaacgcattcccctaatagcattgagggaacaattgctacgctacctactgtacaacaaaatattgggaaaatggaatcactcttattatctgcacgtcattttttatggagtacagctagaggttacaatcaatataatgaaacacttaatatttggaatgaaacatctgcaagtaaaattttagtcatgaatcaaggattagaagtagtggatcttgctatgcgaatagtaggggcaaaaagtttagaaatggatcgtccattacaacgctattatcgtaatatgcgtgctggcctacataatcctcctatggaagatgcagcatatacgaatattgcaaaatctatacttgatttaatgtagaatgaattttttatttataatatgtttaaagaaagctatgattacgtataatgtagtcatagctttttttacatattttttggagggatttaatgactaaaatatattttaatcatgacggcggcgttgatgatttaatatcgctattcttattactacaaatggataatattgaattagtaggtgtaagtacaatcggtgcagattgttatttagaaccttctctaagtgcttcatgtaaaattataaatcgtttttcaaatttatctattgatgtagctccttcatatgaaagaggagttaacccttttccgaaagactggagaatgcatgccttttttatggatgcgctgcctattttaaatgaggaatggattgataaacgttctataacgagtacatttgaagcttatgaggatattattaatgtattaaataatagtaaagaaaaggtgactttattgtttactggtccgttaactgatttagccaaagcaatcaaatatgataaagcaatagtaaacaatattgaaaagttagtttggatgggaggaacatttttagaaaagggaaatgtagaagaacccgaacatgatggcacagctgaatggaatgctttttgggatcctgaagctgttaaaacaatatttgatacgtctatcaagatagaaatggtagcgttagaaagcactaatcaagtaccattgacaccagctattcgtcaaatgtgggcaaatcaacgtcagtttataggagttgattttttaggcatcagttatgcagctgtacctcctcttactcattttgtcaccaactctacttactttttatgggatgtattgacgactgctcaaattggtaaagaaaacttaacagattctatagaacttaaagtagatgtatgtacaaaaggaccaagccaaggacgcacatatgagagcgatgatggacgtatggtgcatgtcgttaatcatgtcaatcatgatgaattcttcaactatattacgtctttagctaaaaaagtatctcattaactttaaatgtaaactttttatataaaatagtttacataagtggtataattttcttcataaaaggaggaaatcaaatgagtacaaaaaatttagtatatacagcgttaatgacagcggttatttgtattttaggcctagtacccggaataccgttaccatttatgcctgtaccaattgtattacaaaatataggtatctttttagcaggagttatattaggacgtaaatacggcgcactcagtgttattatcttcttattattagcagccacaggtttgccattattatcaggtggacgcggtggaataggtgtgtttgcaggtccttcagcaggatttttattcttatatccagtagtggcgtatcttataggtttagtaagagatcgttttaaaaatcatattaatttcttgacattatttattggtatacttgtatttggtgttttattattagatattgtaggaacaatcattatgggattcattatacatatgcctataagtaaagcatttttattatcatttacatttattccaggagatattattaaagcgattattgcgagtttaatcggcacaacattacttaaccattcacgttttaagaatttgatataatagtacaaaatatacatagttgggtgatggttactatgacatacataacaatgaagcagattaaagaaaatggaaaaatatacttagaagatgagttgaatattatatatttaacaccttctgatccaatgacatatcacatgaataagtggcagtacaaaacgttaccttcaattaatcagtggtattcagatatggagaaacaacgaattttgcataaaaaacaacattcttctcatttatcttttacatttccagaaaaccaattactgcattctacatggttagaagcgatacgcaatgaaggatttcaattaggactacttgaattgtacgcgatagatagtgttacattaaaacaatttgagagcaatattcaggtagatattgaacctgtaacttcatttaacatggaagattatttaagtgtttacaatgaattttcaaaaccgtatggcgaagcgtttgttaaagaaagtgaagaacgaacgagagaggcaatattaaatcaaatagatgatgtcactcgtatagttgcatattatcttcataaacctgtggggattttggatgttatagttacagatgaaaccgttgaaattgatgggttcggcgttttagaagactatcgtcataagggaataggtactacgatgcagtcctatgtaggtcatttagctggttctcgacccgtcatattagtggcagatggtgatgatacagcaaaagacatgtatataaaacaaggctatatttttcaaagctttcaatatcagatagtcaaagaagatgcaatataaataaaagtagggagtgaaaaatgaatttataataaattctatttcactccttttacacgttctggatgactataaatattaaaagaattacctctaataaaaccaatagcagtaatatttaagtcatgtgccagtgttactgctaatgtggtaggtgcagattttgataatataacaccaacaccgattttagctgcttttagtaaaatttcagatgatatacgtccactaaaaataagcattttatttctaacaggaatttgatgagtaagacaaaaaccgtaaagtttatctaaggcattatgtctacctatatcttgacgatgttcaaaaaatgcctcaccatcactaatcgctgcattatgcaaaccacctgtttgtttaaataaagtgcttgcactttgtaaacctgtcatcatatttaaaatttgtcttggagtgagaatgatattagacatcgatgttttagcaattgccgcatcattttgaaaataaaattctcgactttttccacaacatgaagcaaccatgcgctttgtagaatactcaaaacgatcacttaatgacttagttaattctacatgagcaaaccctttactatcatcaatttgtaaatgtttaatttcttcttttttataaatggctccttcagatgctaaaaatcctatgactaactcttctaaatgtgtcggactgcagattactgtagcaaattcttttccattcaccataatcgttaatggaaattcggttacatagctgtcttcagtttcgatgagttgctcatcttcatacctaataattggttgattttgaacggcatctttatccatgaatgtctcccctttggttataactactttatactgtatcattatattcacaaaaagtatttcaatattgaatgattatataaaactttatattttaaaatttagaaataaatataaaacatggtaaaacttttcaaaagatataaaaagcgtataatatttgattgaatagggggcataaaaataaatgactgtaaaacgattattagcggtgttagggactttcattatcattatggcaggttgttcaaattcaaaagataatgagaatagcaagcaatcttcaaagtcaaataatagtgataatcctaaaactgaattgaaagtttcagcagcagcaagtttaagtgatgtaagtaaagcattaaagaaagagtttgaaaaaacacataaaaatgtaaatgtaacatttaattatggtggatcaggagccttaagacaacaaattgaaaaaggtgcaccaactgatgtctttatgtctgcaaatacgaaagatgtagatatgttgaaaaaacataatcaagctcataatacatataaatacgcacataatcagttggtattgattggtgataaaaacagtgatcaagcttcagtaaaagatttaaaagacaacgaaaaattagctattggtgaagtgaaaactgtaccagcaggtaaatatgcgaaacaatatttagatgatcaacatttatatagtgatgtaaaagataaaattgtatatgccaaagacgttaaacaagtattaaattacgttgaaaaaggtaatgctcaaatgggatttgtatatgagaccgatttatatacgaataatgaaagaacagataaagtaaatgagattaaaaaagcggatttgaaaaaatctatcacttatgaagcgggagcaacatcagataataaatttgctaaagaatggatggaatttttaaaatctaaaaaagcgaaaaatattttaaaagaatatcactttaaagtatagggggatgacatatgcctgatttaacacctctatggctttctattaaagtaggatttatcagtacgataattgtctctatattaggaatttttatttgtagaacgttatataaaagaaaggggcatgcaactcaatttcttgaaagcttaatattattacctattgttttaccaccaacagtactagggtttatacttattattgttttttcacctagaacatttgtgggacaattctttcaaaatatacttcatttacccgtagtatttacaatgacaggtgcagtaattgcatctgtcattgttagttttccactgatgtaccaacatactattcaaggatttcgaagtattaaccctaaaatgttaaatactgcacgaacaatgggagcaagtgaacgtaaaatcttctatcgtttaattctaccattatctaaacgttcaattattgcgggtattatgatgagttttgcgagagctattggagaatttggtgcaacattgatggttgcaggatatattccaaatacaaccaataccctgccacttgaaatctattttttagtagagcaaggaaaagaaaatcaggcatggttatgggtacttgtactcgttgctttttctattacagtcattagtatgttgaattttgcgaatcgtgataaagctcaggaggtagactagatgttacaagttaaattacaacatcagttaaaacaaacattgattcatattaacattgaagatacaaaagctaaaatatatgcaatacaaggtccctccggcattggaaaaacgacaatattaaatattattgcgggattaagacaaccagatgaggcttatattaatgttaataatcagttattagtagatactgaaaaccatattaatgtaaagattcaacaacgccaaattggctatttatttcaagattatcaactttttcctaacatgacggttctccagaatattacatttatgactaaacagtctaaacatattgatgagcttattcaacgtttaaatattagccatttaatgaatcaatttccgccgacactgtctggtggggaagctcaacgtgtagcactcgctcgaactttaagcacgaaacccaatttaattttacttgatgaacctttttcaagtttagatgatatttctagagatgaaggcatccatctagttaagcaaattcatgaggaatggtgtatacctattatttttgtaacgcattctaattatgaagcagaagtattagcagatgaaatgattcaaattaaataaacaggagtaggatatcgaagtctagaatgttttagatttctgtcctactcctatttcgttataataaaaagaagagagaatgttgagagaggtttcaaataatgactcaagaacgttattcaagacaaattttatttaaagatattggagaacatggacaacaaaccattaatcagaaacatgtattgattgttggaatgggcgctttgggtacccatgtagctgaaggacttgttcgtgctggtattcgagagttgactattgtggatagagactatattgaatatagtaatttacaaagacagacattgtttacagaaagtgatgcagatcgtatgttgccaaaagtgattgctgcacaagatcacttaaaacatattcgctctgatataaaagtgaatatttatattgaacatgtagatgcccaatttttagagcaatatgcaacgagtgtagatttgattattgatgcaacggataattttgaaacaagacaattaatcaatgatttttcctacagatatcgcattccttggatttatggtggagtagttcaaagtacctatgtagaaactgcatttattccaggtcaaacaccttgctttaattgtttaatgcctcagttaccagtgataaatctgacatgtgatacagtcggtgtgattcagccagccgtaacgatgaccacaagttttcaattacgggatgctttaaagatattgattggtaaacagattcccacgaagctgacatatggagatatttgggagaatacacatttttcttttggttatagtaaaatgcgtcgtgatgattgcccaacttgtggcaaaaatgctagctttccgtatttatatactcattcgacttcatatgcaactttgtgtggtagagatacagttcaatatgaaaataaagacattacaaaaaaagtattagttgattttcttatagcacttgatattcgttatcatgaaaaccaatatatgttagtatttgaatttaaaaaacatagaattgtatattttgaaggtgggcgaatgttgattcatggtacaactaagaaatctgaagcaatacagttaatcaatcaactatttggataaggagagaatgatgatgcatgagcatgaaaataaagaagttaaaaaaacaattcaatgtgcagtgttaacaatttctgatacacgaaataaagaaacagataaagggggtcaattagttcaaaagtatttgaaagaactgaatatagaagtgacagaagaacactataatatcattaaagatgacaaggaagacatccaatctcaaattgatgaatggttagcatcagatattgatgtcattataacgactggaggtactggtatagcacaacgtgatgtgactatagaagctgtaaaaccacttttagataaagaaattgaaggattcggcgaactttttagatatttaagttatacggaagatgtaggaacaaaagcgcttctctcaagagcattagcgggaactgttatgagtaaattaatctttacgttgccgggatcaactggggcagtaaagttagcaatgactaaactcattattccggaattaaatcatatggtttatgaactcaataaataaaatagtcataaaaagcattgtaaatcataggtttccctaattgaaaatgctgcttatgactatcataatagaagacaatcatatagattaatctaattgacggtgataatctccagatttacctccagattttgattcaaggtatgtgtcaccaatgatcattcctttatcagctgcttttgtcatatcgtatactgtgagagctgtaactgaagcagctgttaaagcttccatttcaacaccagtcttacctgtagtagaaaccgtagcagtaatgcttaattgatagtggcgttgtgtgttcgcttgattccaagagaattcaatatctattccagttaagggcaatggatgacacatcggaataatagtcgaagtatttttagcagccattatacctgcaatttgagcagtattaagtacattaccttttttatttgtattgtcaataatttgatggtaaatcgcttcattcactgtgatgcttgaatgcgctttagcaatacgttttgtaatacttttattcgaaacatcaaccatttttgcattaccttgatgattgatatgtgtgaaatttgacataaatagcctcctatagaaatatctaaaaatcataacatataaataaagttataatcatttatttttaataagtacatcattattttactgagtttataaaatagtatagcatgaatttatcgtgtaattggagttgataaaatggtagttgaaaaaagaaaaccaatacctattaaagaagcaattgaacgtattgtaaaacaagatatatatactccacaaagtaatatatcattagaggacagtttaggatatgtcttagctgaagacattgtagcaacttatgatataccacgtttcaataaatcgccgtatgatggttttgctataagaagtgaagattcggctggtgccttttcaaaaaatcgtaaaacatttaaagtgatagatcatattggtgcaggcacagtatctcataaaacagtcggagaaaatgaagcagttcgtattatgacaggcgctcaaattcctgagggcgcagatgcagtagtgatgtttgaacaaactgtggaaaacggagatacatttactattagaaaaccttttgaagagaatgaaaatgtgtcgctaaaaggagaagaaacgaaaacaggagatattgttttaaaaaaaggacaagtcattaatcctggagctattgcagtactagcgacctatggttatacagaagtgcctgtgtttttaaaaccaagtattgcagtcattgctactggaagcgaattattgaatgtagacgaagaattacaaccaggaaaaattagaaattctaatggtccgatgatacaagcattagctgataaaatgggattaacgatagagccttatagtatacaacaagatgacttagaaagtagtattcaagtcatcactaaagcaatgaaagatcatgatattgtcattactactggaggtgtttcggtaggagattatgactttttaccaaagatatacaaagcaattcaagcagaagtgttatttaataaaattgcgatgcgtcctggaagtgtgacaactgtggcagttgcaaataataagtatttatttggtttatcagggaacccatcggcttgttttactggttttgaattatttgttaaaccagcagtgcaacatatgatgcaagccaaagcagtttaccctcaagttgtgaaagcaacattaatggaagattttgcgaaagccaatccatttacaagatttattcgagcaactgcatcttttactcataattgtgcgactgtggttccatccggatttaataaatcgggtgctgtagtagcaatagcacatagtaatgcaatgattatgttgccaggggggacaaggggatttaaagccggacatactgtagatgttattttaactgaatcgaatgttttcgaagaggaactatcattatgattttacaaatagttggttttaaagattcgggtaaaacaacgttgttacaacaatctattacatttttaaaatctcaaggctatcatattgtaacgattaaacatcatggacatgataaagatgatattacgcttcaatcttctaatgtggatcatatgaaacattttgaagctggtgcagatcagagtattgttcaaggatctgcttatcaacaaacggtaacacgtagaaatcagccgtcgcttgaagagctgataaaagaaagtgtaactattcgttatgacgttattttagttgaagggtttaaacatgagaattatgacaaaatagtggtatatcagacccaagaagaattagaaaaactgagacttcttacacatgttcaatatttttataattataataatgagaatgctttaaacaactatgagcaatggttactaaaatggatgaaacaaaaggatgaataaaaaaatgaaacaatttgaaatcgtgacgaatccaattgagcccgaacaatatagaacatttactttaaatgaacatcaaggagctgttgttgtctttacaggtcatgttcgcgaatggactaaaggggtgaaaacagaatatcttgagtatgaagcttatgttccaatggctcaaaaaaaactagaacaaattggagaagaaattacacagcgttggccaggaacgataacaacgattgtacatcgtattggtcctctacacatttccgatattgcagtattgattgctgtctcttcgccacatcgtaaagacgcctatcgtgcaaatgaatatgcgattgaaagaattaaagaaattgtgccgatttggaaaaaagaaatttgggaagacggtgcagaatggcaaggacatcaaagaggagaccacagtcaagcaactaaaggaggggcttaaatgagagtattatattttgcagaaataaaagaaatattagaaatgaattcagaggacattgatttaatagaagatattacagtagaaacatttaaagaattattatttgaacgtcacccatccattcgtgataaaaaatttcaagtagctgtgaatgaagaatttgttcaacttaatgatattgtaaagcaagatgatattgttgcgttaatacctccagttagtggtggttaaatatgaaagcaattattctagctgggggacactctaaacgttttggtagtcccaaagcatttgcttgtattcacggtgaaatgttctataaacgaattattaatacattaacagaaacgaatttatttgacgatattattatcagtacaaacaaacaacttaaaaatgaatttgagtataaacagattatgatagatgaagaaacacatgcagataaaggcccgttatcaggaatctacacagttatgaaacattataataatgaagaattattttttgtggtttctgtagatactcctatgattactaaagaagcaataagtcaactatatcaatttacaatttcacagcgtatggaacatcaagcagatattatagcttattcagacaatgataaacctataccgaccattgcgttttatagtcgaggagtcatttcgaatattgaaaaagcactcaattctaatgattatagtttacggcatgtatataaaaatgtgataacatgttttctagatactaaagaggttcagcctttaaaaaattggtctaaaaatattaattatcaagatgatttgaatactttacttcatcagattaatgattaaagggggacgcgttaatgacgatccaaattaaagacaaattaggacgtcctataagagatctacgaatttctgtaacagatcgttgtaatttcagatgtgattattgtatgccaaaagaaatatttggtgatgattttgtttttttgcctaaagaggaattactgacatttgatgaaattacaacaattgccaaagtttatgctgaattaggcgtgaaaaaattaagaatcactggtggagaacccttgttacgacgtgatttatataaattaattgaaaaactcaatcgtattgagggtattgaagatattggtatgactactaatggtttacttttaaaaaaacatggtcaaaagttgtatgatgcaggattacgtagaattaatgtaagtttagatgcaattgatgatgaggtatttcaagcaatcaataaccgtaacattaaagcttctaccatcttgcaacaaattgattatgcggtctctattggatttcatgtaaaagtaaatgtagttatacaaaaaggaattaatgatgatcaaatcctacctatgatcgaatattttaaagataaacacattcaaataagattcattgaatttatggatgtaggtaatgataatggttgggattttaataaagttgttacgaaagaagaaatgctatctactattgaagaagagtttgatatagaaccacttccacctagatactttggtgaagttgccacatattatagacataaagataatggtgcacagtttggtctaatcaccagtgtttcagcttcattttgttctacttgtacaagagcaagactatcatctgatggaaaattttatggatgtttatttagtgtgattgatggttttgatattaaatcattattgcgtagtggtgctacacatcaaaaattaaaagacacgttcatttcattatggcaagcacgtgatgatcgttattcagatgaacgtacagaacaaacagtaaaaaatcgacaacgaaagaaaattaatatgaattatattggtggttaatctatacagaagtaagtgataatcatatgtgatattacttacttctgtattttaatttgatagtagctttaattaattttaataatttcaaagtaatttatattaatcactaaacagatataaattaatatttgtaatagattaaattgtacatatgttatataattaaattaagcaattttattatattatgtatttatacaacttagaatcaactttggaggcatgtactatgaataataaagtgaatcgctttattgaagcggaaaaagaactcagtcaactaaaacattggttaaaaatgacgtataaaatttctattgaggaatttgtcgttttatttaaagtgtatgaaggtaaaaaaattagcggaaaagagttacgcgatacattacattttgaaatgttatgggatacaagtaaaattgacgtaatcattcgcaaaatttacaagaaagaattaatttctaaattacgttctgaaacagatgaacgacaagtattttatttctttaatgcgtctcaacaaaaagtattagataaaatgaaaaatgaaattgaagctattagtattgcaaattaattaaataaaaagagcacctctcatattctataacgaataataggggtgctcctttttacatattaaatgaaagattaatacgtattaccatgtacttttctaccatgaacaattaaataaagtactgtacataaagcagctacaatagccataatgagataaacttgagtatacgtgattgaatctgtaaataatccaagcaacgatggaccaaagccaataccaatatctaatcctataaagtaagttgaagttgcaattccatatttacttgaaggggagactttaattgcaatggcttgcattgaagaagagaggtttccataaccaatacctaagaacacgccagcaagtaataatacccaaccattgtagctaaatactaataaaacaaatgtgataattaaggcaagaaaagctggataaaccacaacgttttcattttttgcatcaatcattctaccagcaataggtcgagtgattaatgaagcgaccgcatagaaaataaagaaataactagatgcttctaacaaatgacgttgctcagcaaaaggttttaagaatgttaggattgacgcataatttaacccgatgatcatcataacaattgctactggtacagcttctttagcaataaaattatgaatattgaaaccagaagcttgagctacttttctatcaactgcatttttagtaggattaaaatcaattttaataaagagtgaaacaattaaacttgcgattcctagtatgagacagataagaaatagtaaattaattgagaatgatttcaataataaaattccaaagaaaggcccaatagctgatccaagaacaaggctcagtgaaaataagctaataccctcacttttacgttctacaggggtaacatgtgcagcaattgtacctgtagctgtcgttgcgatagctgtagcaattccatttaggagtcgtacaaacatcaagatggttatcgacccagagataaaataaagtaactgagtaatgattagaaaaattaaaccaacaattaaaatttttttaggaccaaaacgattgacatactttcctgttccaaaacgtcctattaatgatccaataataaatagtcctacaacaagtccagatatactgtctgacacatgataggatgttttagaataatcagcgatgataactaataataagtacatacataaataaacaaagaagttaatgataaaattgattgtaaaacttctagtaaaaataggttgtttaatagtactagtctgattcatgagtatcccccttcgataatgtggtatgtaattttttcatgattgctatgacgtgatccaagtcatcattagatatattagattgatggattaaatcttcttgaataggtgtaatacaagcattcatgtcctcaaataattgctgtcctttttcagataaacttaatagcttttcacgtttgtcagtacctggagtaaccaaaagtaaatctttttcaaatagaactttaataattttacgcgcagtcggtttttcaataaaacgacgtttagatatttgaactaaagtcgtttgatcatatgtagcaatatctttaagcactaaccactgacctgtatgtagaccaaattgatctaatataggttgagtacgtttaatataaggacgataaataccaataaaactattaaaaaattcatttgtgagcattttaaattgtctccctcgaaaatagttagcaaggctaactaattaataccgaaaattattatacgctgatttcattcgtttttcaacactaaatataagttatagagtaaagtatagtgaaatttgttaaaatacaattaagtttaaattagtaaaggggatattgatacatgaaattgaaatttgatcatatgattcattacgtcgatcaattaaaaggatttaaatatccaggtgagttattaaaaattcattctggaggcaagcatcatcaatatggcactttcaatcgtttaacttatataaatggaaattacatcgaacttttagatgttgaaaatgtcgaaaagttaaagaaagaagctaaaactgaaaagggtagagtcgcttttgcaacgaaaattgttcaagataattttaagcaaggatttaaaacaatggcatttagaacggaagatatagagagagtaaaacaatctttaaacgaacgtcatattgatacgattggtcctataaatatggacagagaaaataaaaagggtgaaaagataagatggaagttactctacatcgctgatcccgactatatggtaaggcctcctttttttattgagtggaataaaaataaagtcgatcatatgcaaaatttggattcattttttcagaaacaatttaaaattgataaaattattatagatagttctaaacgctctaaaaccttaactaagtggcaaagctggtttaatatggatattatagaagaaaatgagaactacactgatttaaaattagagggggacactattgtttatcggattcaagatgcggctcaatctggatacaataccattgtttttaaagataatgagactatgactccttattcaatcattattaaaggagccaaatatcgtttcgaacctaatgaaggaactaattaaatagataggtataagtactatgtgcaataaaagcaatatgaataaaaactagtactaaagaaattaagcttagtattaaagaaaaacgatttgtttttaatagtataaataaaatggtaagtacaagtgataaagcgacaaacatcactctcagactaaaaaaatttatagttaatggatgagccattgtataaattattgcaatagcattacatacaataaatataagtaaaataatatttctcaattttaaaaacctctttaataaaaaatagtagtgtttttcattcattaagtataacaaaaagaatagctttttgaagaaaatacaacttctattatgagtttgtcgacactctcaaatctacaatgtataatgataagtaatgcaaagataaaggagttttatatagcatggaaaagatgaatatcacaaatcaggaacatgacgaatttgtaaaaactcatccgaatggtgatttattgcaactgacaaaatgggcagagacaaagcgcttaactggatggtattcaaaacgtgtggcggtaggtgaaaatggtaaaattaaaggtgtaggacagttattatttaaaaagataccgaagttaccatttacattatgctatgtatcacgtggattcgtagccgattataatgatagagatgtactgagagcacttttaaatgaaacaaaaaaaatcgctaaagaagaaaaagcgtatgcgattaagattgatccagatgttgaagtagaacatggcacagaagcacttaaaaatttaagaatgcttggatttaaacataaagggtttaaagaaggattatcaaaagactatattcaacctcgtatgacaatgattacacctattgataaaactgatgatgaaattattcaaaactttgaacgtcgtaaccgttctaaagttagattagcgcttaaacgaggtactaaagttgaacgctcaaatcgtgaaggacttaaaacatttgcgaagttaatgcaaattacgggtgaacgtgatggtttcttaacacgtgatattagctattttgagaatatttatgactcattacatgaagatggagatgcagaattattcttagtgaaattagagccacaacaagtgcttgatgaaacgaataaagatttagaagctcaagaagcagaaaaagctaaattagaagcgaagtcagaagcacgtccaaatgacaaaaagacagctaacaaattaaatgatataaaaaataagatttctaagacaactgaattaaaagaagatttagaaagattaaatcaagaacatccagaaggcgtatatttatcaggcgcattacttatgtttgcaggtaaaaaatcatattacttatatggagcttcttcaaatgattatcgtgatttcttaccgaaccatcatatgcaatatgaaatgatgaaatacgcaagagaccatggtgcaacaacgtatgactttggtggcacagataataatccatcaaaagattctgaacactatggattatgggcttttaaacgtgtatggggcacttatttaagtgaaaaaattggtgagtttgattatgtcttaaatcaaccgttatatcaattaatcgaacaagttaaaccaagacttacaaaagccaaaattaaactctctcgcaaattaaaacgtaaataattaatttacagtattgtagatacagtatttaatctgaacgattctatgaagaaacgttcagatttttttaccaatattaatcacttattataggagaagtaacaaaatgattaaaaagatgcttcaattttcattaggtaataagtttgctatttttttaatgattcttttagtcattataggtggcatatattcaagtgctaaacttaaattagaattattacctgatgttgaaaatccaattatttctgtccaaacgacgatgtcaggagctacacctcaaacgacacaaggtgaaattagctcgaaaattgataaacaagtcagatcactcgcttatgtaaaaagtgtagaaacacaatcgatatctaatgcttcaattgtgaaagttgaatataacaacggaactgacatggataaagctgaagaagtactgaaaaaagaaatagataaaatcgattttaaggatggagtaagtgaaccagaattaatacgtaattccatcgacgcctttcctatcgtagcttactcatttacaaatgaaagtaatgacttaagaactactacaaaggaaattaatgaacaattaatacctaaacttcaaactgttgacggtgttcaaagtgcacaactgaatggacaaactacacgtcaagttactttgaaatttaaacaaaaagaattagataaagtagggttatctgcggatgatgttgaaaattacattaagacagcgactagagaaacaccactcggtttatttcaatttggaaataatgaaaaatctctcgttgtggatggtcaatttaaatcagtcagtgcattaaaaaatttaaagatccctctttctatagcaggtcaaggacaatcaagcgattctaacgataatagtattagcagtactggccaagaggacagtcaatcatctagttcaagtcaatcgcaagcgaatagctctttaaaagaaacaaatggtcaaatgccaagcgtgccacttaaagatttagctaaaatcactgtgggcgatgaacgagattctatttcaaaaacaaatggtaaagatgcagttaacgtacaagtaatgaaagcacaagatgcaaatacagttcaagtggctagagcaacgcaaaagaaaatagacgagtttgttaagaataacagtgatatcaaagccacaaaaacaatggacacagctaaaccaattgaagattcattatatactatgattgaaaaagcggccttaggtaccatcgtcgcaattattgttattttattattcttaagaaatattaaaacaacagcgatatctatcgtttcaattccgttatctattttgattgcacttattgcactgaaattaagtaatgtatcacttaatattttaactttaggtgcattgactattgcgattggtcgggtcatagatgattctattgttgtagtagaaaatatctatcgccgattatcagatccaggtgaacaattaaaagggaacaatttagttattagtgcaacgagagaggtatttaaacctattttatcttctacgattgttacaattatagttttcttaccgctagcttttgtttcaggctcagtaggtgaaatgtttcgaccatttgcgttagctatcacatttagtttactggcttcgcttcttgtttctattactgttgtaccagctcttgcctcaacgttctttaaaaatggaataaaaataaatggcaatgttaatgaagaaaataaattagggagaattagtaaggaatataaacgagtactgggttggtcacttaatcataaatggcttgttcttattattagtattgttatattaattgcgagtataggaattggtgcaactaagttaggaacaagttatatttctactggagaagataagttcttagcgttaacttatacacctaaaccaggagaaactgaagaagcagtacttaaacatgctgaaaaagctcaaaaatatcttcaaagtaaagataaagttaaaacagttcaattttctgtaggtggaccttctccagcagatccaacaggaagcacgaatagcatggctattatggtggaatatgattcgaatacacctcactgtgaggaagaaccagataaagtggttacacatctttctaaaatgaaagacccaggtgaatggaaaaatcaagacttaggtacaggagctggaaacaattcagtggacgtaactgttaaaggaccttctactgatgcaattagaagtacagtaactaaagttgaaaataaaatgaaatccattaaaggtgtagtagatgtcaattcagatttatcacagacctatgatcaatatgaaatcaaagtagatcaaaataaagcaacagataaaggtatttcagctgcacaattagcattgaatttaaatgagaacttaccagaaaaaacaattacaactgttaaagaaaatggtaataatatagatgtaaaagtaaaacagaataaacaaacaaattggtctcaaaataaactagaaaacattgacttacatgcaccaagtggagaaactgttaaattaaaagatatcgcacgtctaaacaaaacaacaacaccaagtaaacttgttcaaaaagatggcgattatgctacaacagtttcaggtaagattaccgcttctgatgttggtggaacctctagtaaagtgatgcgtgaaatcaatacaattgataaacctaataacgttaagtttaatgttggcggtgcaacagatgatattaatacagcaatgagccaactcgcttttgcaatgcttattgctattgttattgtgtatcttgtgttggttatcacattcaaaggtggtttagcaccatttacaattctattctcattaccatttacagctattggtatagtatttgcattattgattaccagagaaaccatttcagtaccaagtttaattggtatgttgatgttaattggtattgttgttacaaatgcaattgtattaattgatagagtgatttcaaatgaacatcaaggtatgttaatgaaagaagctttaattgaagcgggtggaactcgaattagacctattttgatgactgcagttgcaacaatcggtgcattattaccattgttatttgggcaaaatagttcaattctaatttctaaaggaatggctgctacagtcataggtggattagtatcatcaacactactaaccttaatcgtagtgcctgttatctatgaaatactctttactttaaaaaacaaacttacacgtaaataaagataaatttaggataagtcaaaaaaagcaattgagacgtatgcacatacgttcaattgcttttttattaatacatagtaaaagttaaaataatatatattacaaaaataatgatagatataatatttaaaatcgaaacacctttatgatcgtttttaagtgctttaaaagctgtaacttctacatttcctacaagaagaagcaatacaacaaatacccaccaattttcactaggaaattggatcgtagtgatagctactacaaataataataatattcccataataatacgtaaaatatgtacgaacattgatttcattttaaaaatactgatataacttacaataagatacagtatgggtaataaaattaagtatattttcacttgatgacatcctttctattacgactaatatcatagcattcatgaactttaatgcctagatatattgaaaaattatttctgacgtaattttgaacgtatgtctgaaatttctttttcaatttcttctaattgttttactaaaggatcaatctgttgatttagtgattcttttttctctaaatcattttgtaaacgaatataatcgtatttaagctcagctaattgtgattctaattccatgtctagtcgaactccttatttattaatatgattagtaatgattatagcatgaaacaagtaacttctaaaaatactgttaattgtgttagagtaattagttgtaatggaatattagggaagaagggatgaattgtgactgagcaatttataatcattattttgttaattgcattaggttacttacttaaacgtattaactttattaaatctgcagatagtcaagtattgtctacgcttgtattgaatgtcacattaccttctttagttattgtcaatttaaatagtgcgaatcttgatttatcattttctattttaccaattatgatgctcatctatggcatattagccaaagtaattatggttgcattatttagaaaatatgataatcatgtcaagggttcagtaggtatgatggcagcgtcattaaacattggtttatttgcttatccacttgtagaaacaatttggcctaaaaatggtatgatttattttggtatggctgatatcggtggggcaattattatgtttggagtcacttactttgtaggtagttattacagtgaaggaagcgatcaatttaatttcaaatttttagggaaaaagttaatttcttcaataccactcgttacttatattgtaatgtttatacttaatatggctaatattcatttaccaaaagcttcaattgacttttttacaataatttctaaagcgaacatgccattatcaatgattttacttggaattatgttgagcttcagaattgaaaaacaatttttaccaattgcagtgaaatatttaattgtccattacggacttggatgtattgctggtttattagtccactttttcttaccaacatcagatgatatgattaaaacaacattattaattacatggttacttcctgtgggtgtggcaattattccatattcaattcaatttaaatataaaacattaccgttagtgggaatggttactaatatttctattgtgataagtattattattatatatatttatcaagctatctttgtataaaaactacatatacacatgaaaaaagcaagcgatttttaatcatcgcttgctcttttactttatagtatgattacccttttccacccataaatgcaggatagttcatcataccaccatcaacatataatgttgttccatgaacatagctagctaaattagaagctaaaaacaatgcaccgtttgctacatcttttgcatcaccgatttctctagctggaatcatttctaatgtttcggcacgtgtttttgaatcagagaatttttcttttgtatgctcagtcacaacggcacctggagagatattattaatacgaatgccatgttgggcatattccattgacattgtttccatcattaacttaagaccgcctttacttgcagcatagttaacgtaatttggccaaggaattgtatcatgcacgcttgaagtattaataataatacctttcttatcttcttttaaaaattgttttaccgcttcacgtgaaccaataaatgcacctgttaagttaatatcaaggactttttgccattcagccatagacatttcatgacttggagtggctttttcaaaaccagcattattaatcatgatatcaattgttccaaattctttaacagccgtttctactaatcgtttcacatcttcttcgactgaaacatcggcttgcaccgtaattgagtcaccgccagattttttgattgtttcttgaagggcatcaagttcttccatatgactttctgatctataatttaagactactttcgctttttctttaccaaaaacttccgccattgcttttcctatgccactgccagagccagtaataaccacaactttattttctaattcagaaaacattgtataacctcctcaatatacctattttaagtttcctaatataatggctgcgataataatcaacgcaatacctgaccaaatcccaatcatttggcgtcgatcttttttctcacctaataagaatataccaccaagagtagaaactataactaataattgtgataatgagaaacttgttgctacaccaactttaggttgagaatagaacataaataagttacctattccccaaacaatccctggaataatattaagtgtggtagatttaatatttgtttcatgtctcattgaaagtaaaaatccaccaatagccataccaactgattggaagaataaggcatcagtaccatttacgccaaatatattgccgattactacataacctacataacctaatgtacctaccactagaattaccattgctttactaaaattaggatcttttgtagaacgctcattttttccttttagtgatgtaagtgcaatccctgttactaataaaaccattgcaataagtcctaacgtaacttgtaatccagtactccattcacctaaaaagatagcactaaataaagttgtacctactaattgtaaaccagtagaaataggcattgttttagatacgccgacaaggttaacagattgtaattgagttccttgaccgaatgcccacattgcaccagaaattaaccctacaatgatgacagtagggttatcaaattgtgcatgacctgtaagaagtaagattagaccaataaccaatgtacctaacgttgtacctctaatttgattgtatggacctcctcctacaaatacattgattaatacgagacttccccaaaataatgcaggtaataaggcgattaatatgttaataatctgcatttattactcactctccttttcaaaaataagtgctttcctttccataacacttggtaaatattttatattatttgtgattgatataaaacgcaattgctcattttttataaaatataaaagactaatattataaaaatgtatagcctaagtattttagtaagctgaatttaaatataggggttttactttaaattaataagatgagatggaaagtaacactattgctatacatgttacaatattaaacgtatgaaaataaaaagtaagaatgtgaaaggaaatttgaatgaaatcattaattctagcggaaaaaccctcggtagcgagagatattgcagaagcactaaatattaaagaaaaacataatggatatatttcaaatcagcgctatatagtgacatgggctttaggtcatttagtaacaaatgctcaaccagaacattatgacaaaacatataaagaatggaaattagaagatttacctatactacctaagcaaatgcatactgtggtcatagggaagacaagtaaacaatttaaaattgtaagatctttaatattaaataaagatgtgaaaaacattattattgctacagatgctgggcgtgaaggagaactggtagcacgtctcatcttagataaagtaaaaaataaaaagccaattaaacgtttatggattagttcggtgactaaaaaagcaatacaacaaggctttaaacatttaaaagatggtcgtgaatataatcacttgtatcaagcagctcttgcacgaagtgaagcggactggatagtgggtattaatgctactagagcactgacaactaaatatgatgctcaactttcattaggaagggtacaaacaccaacgattcaactggtttatcatcgacaacaagaaattaatcattttaaacctcaaaagtattacacactttctttaaatgtaaatgacgctacatttgatattcaaactaataaaagatttactaataaagaagaaatacaaaaattatctgaaaaaatagaaggacaatcaggtcagattgaagatgtttcaattaagcaaaaaaaatcttacgcaaaacctttatataatttaactgatttacaacaagcatcttaccaacgatttaaaataggacccaaagaaactttgaatattttacagagtctttatgaacgtcataaattattaacatatccaagaacagattctaactacttatctaacgatatgacagataccatacaagaacgtctccaagccttattagcgactgattataaatcacatgctcgtcagttaatgactaagtcatttacaactaagatgcatatttttaataatcaaaaagtgtcagaccatcatgcgattattccaactgaaattagacccaactttgatacattaactaacagagaaacaaaaatatatttaatggttgtacaacgatttttagaaacattaatggatccttatcagtatgaagcgacacaggttattttaaaagtgggagaatatcaatttaaacatgccgaaaacgtcacacgtaaattaggatttaaagcacttagtaacaatgattctacttctaataagactatcacttttagcaagaatgaaacctatcgtgtacaacaagtcaaagtaagcgaacatgaaaccacaccacctgaatatttcaatgaaggtagcttacttaaggcgatggaaaatccacaaaattatattcaattgaatgacaaaaagtatgctaatacccttcataagacgggaggaattggaacagtagcgacgcgtgcagatattattgaaaaactattcaagcttaatgcaatagaatcaaaagatgggaaattaaaagtgacatctaaaggaaaacaaatattagagctttctcctaaagcactaacttctcctttaatgactgcggaatgggaagaaaaattactttctattgagaaaggtaaatataatgctaaacaatttattaatgagatgaaagattttactaaaaaaattgttggggaaatcaaacatagtgatcaaaaatataaacatgataatttaacttctactgaatgtccaaattgcggtaaatttatgataaaagtaaaaactaaaaacggacaaatgctagtgtgtcaagatcctacctgtcatactaaaaagaatattcaacgtaaaacgaatgcacgttgtcctaactgtaaaaagaaaatgacattgtttggaagaggaaaagaagcggtctaccgatgtgtatgcggtcatactgaaacacaagcacaaatggatcaacgattgaaaaataaaaataatggtaaagtttctaaaaaagatatgaaaaaatatatgaataatcacgatgaattggataataatccttttaaagatgcattaaagaacttgaaactttaaataaaatcgaacttataatgaaataaatcgataaaagttcgtttttagtattgtttttttaagtaagtaatattaaactattaaagtattttaaaaaaaggagtttaaagctgtgaaaaaatacttccaattcgacgagtatggtactaactacaaaagagaaatcatcggtggtatcacaactttcttatcaatggcttatatattagccgtgaatcctcaagtcttaagtttagcaggtgttaaaggtatatctggggatatgaaaatggatcaaggtgccatttttgtagcgacagcattagcagcctttgtaggatctttattcatgggactaattgcaagatatccgattgcgcttgccccagggatgggattaaatgcgttctttgcatttacagttgttttaacaatgggaattccttggcaaatcggtttaacaggtgtgctgttttctggtatattctttgcgatattaacagcaactggattgagggaaataattattaatgcaataccctatgaaatgaaaatggcagtttcggcaggtatagggctatttattacttttgtaggtttacaaagtgcaggtattattgtaaaaaatgattcaacgcttgtaacattaggtcatctaactaaaccatcagtacttttagctatatttgggattgctataacaatcattttatatgctagaaaggttccaggttcaatctttattggtatgattataactgcaattgtagggatgattacaggtcaaattcatacaccatcaggtattgtaggtaaaattccaagtattacacctacatttggagcagcttttgaagcatttaaagatccaggccaattatttaccatccaatttcttattgttattttaacgttcttctttattgatttctttgatactgcaggtactttagtagcagtagcaacccaagcaggtataatgaaagacaataagttaccaagagctggaagagcattatttgcagactcacttgctacaattgttggggctatttttggtacaactacaacaacctcttatattgaatctacttctggtgttgcagtaggagcacgtacaggttttgcaagtatcataactggtttttgtttcttattagcattattctttagtccgctaattgaagtcgttacaagtgcagtaacaacaccagcgttagttgtagttggtattttaatggcggcaaactttgctgaaattaattggaaaaaatttgaagtagcagtaccagcatttattacaatcattatgatgcctttatcatattcaattgctacaggtattgcatgtgggtttatcttctatccaataacaatgttaattactaaaaaacataaagaagttcatcctatcatgtatgtattaatggtattatttattttatacttcgtgtttgtacacggttaaacataaaaagacacatttaattcaaaaattaaatgtgtctttttaatattgaaattattaattgtttttatcatctttgtattgagtataaataactttagaatctttatttggaatgtaagttggtgcgttgagcacaacaaatataaagaataccattaagaaaaagagtacccaatgcgtaaacataccaataataggtagaaaagcaacaaatgatccaattaatccaataaatgggatcattgccataggcttaattgtattttgagaatctactaatagaatgatgcctaaaataagataaagtaaagcatttaataacaaaggttgccaaccaaagctaagaataactgtgcctcctaaaaaaggaataccatagaaaaattcgctagctattaagaaaatactaatgattgataaagtaagtttcacatttcttttcatttatataatattcacctccgataaagttcatgaattttaaaataattaacattaaaaatatatagttgcaatttcaaaattcattactctctatatctattataaaggtttatagaaaaaagggaaaaaatttactcaaaatggttgaactacataaaaattttcagtaaaataattaagtatgtgttagacgtaaataaaaaagttaaagaaaaaccttgatttattagtgtttttcttgtaacatatttaatgttggacttgaagaaagcgatgaagcgaaaggttactgacacacccggccgctttgccatggcgttgtgtgagatagttttcgtggagaagtctatcacttcaatgtagacgaacaaggagggaaaattatggcaaaacaaaaaatcagaatcagattaaaagcttatgatcaccgtgtaattgatcaatcagcagaaaagattgttgaaactgctaaacgttctggtgcagatgtatctggaccaattccgttaccaacagaaaaatctgtttacacaattattcgtgcggtgcacaagtataaagattctcgtgaacaattcgaacaacgtacacataaacgtttaatcgacattgttaacccaacaccaaaaacagttgatgctttaatgggcttaaacttaccatctggtgtagacatcgaaattaaattataatagatcaatttaggaggtggactttcgatgaccaaaggaatcttaggaagaaaaattgggatgacacaagtattcggagaaaatggtgaattaatccctgttacagtagtagaagcaaatcaaaacgtagtattacaaaagaaaactgaagaagttgatggctacaatgctatccaagtaggttttgcagacaaacaagcatataaaaaagatgctaaatcaaataaatatgcaaataaaccagctgaaggtcacgctaaaaaagctggcgcagcacctaagcgcttcattcgtgaattcagaaacgttaatgttgatgaatacgaagtaggtcaagaagtcacagtagatacttttgaagctggagacattattgatgttacaggaacttcaaaaggtaaaggtttccaaggtgcaattaaacgtcatggtcaaggtcgtggaccaatggctcacggttctcatttccatagagctccaggttcagtaggtatggcttcagatgcttcaagagtatttaaaggtcaaaaaatgcctggacgtatgggcggtaacacagttacagttcaaaacttagaagttgttcaagttgatactgataacaatgttattttagtaaaaggtaatgtacctggacctaaaaaaggttttgtagaaattaaatcttcaattaaaaaaggtaataaataataagtagcgaaaggaggaaaaagcataatggctaattatgatgtattaaaagtagacggatcaaaatctggttcagttgaattaagcgattcagttttcgcaatcgaaccaaacaacagtgttcttttcgaagcaatcaatttacaacgtgcttctttacgccaaggtacacatgcagtgaaaaatcgttcagctgttcgtggtggtggacgtaaaccatggagacaaaaaggtacaggacgtgcacgtcaaggtacaattcgtgctccacaatggcgtggtggtggtatcgttttcggaccaactccaagaagctattcatacaaaatgcctaagaaaatgcgtcgtttagcattacgttctgcattatctttcaaagttcaagaaaacaactttacaatcgttgatacttttggctttgatgcaccaaaaacaaaagaattcaaaaatgttttaactacacttgaacaacctaaaaaagtgttagtagtaacagaaaacgaagatgtaaacgttgaattatctgcacgtaatattcctggcgtacaagtaagtacagctcaaggattaaacgtattagatatcactagcgctgacagtgtaatcattactgaatcagctgcgaaaaaagttgaggaggtgctcggataatggaagctagagatgttcttaagcgccccgtaatcactgaaaaatcttctgaagcaatggctgaagataaatatacttttgacgtagatactcgtgctaacaaaactcaagttaaaattgcagttgaagaaatcttcgacgttaaagttgaaagtgtaaatattatcaactacaaaccaaagaaaaaacgtatgggccgttatcaaggctatacaaataaaagaagaaaagcgattgtaaaacttaaagaaggttcaatcgacttattcaactaaaataaaataatattaccattaaggaggtaagcgacaatggctcttaaaaaatataagccaattacaaatggtcgtcgtaatatgactacgttagacttcgctgaaatcacgaagactacacctgaaaagtcattattacaaccgctaccgaaaaaagcgggtcgtaacaatcaaggtaaattaacagttcgtcaccatggtggaggacataaacgtcaatatcgtgtaattgacttcaaacgtaataaagacggaatcactgctaaagttgattcaattcaatatgatccaaaccgttcagctaacattgctttattagtatatgctgatggtgaaaaacgttacattatcgcaccaaaaggattacaagtaggccaaacagttgaaagtggtgctgaagcagatatcaaagttggtaatgctttaccattacaaaatattccagttggtactgtaattcataatatcgaattaaaacctggtaaaggcggacaaattgctcgttcagcaggtgcaagttcacaagtacttggtaaagaaggtaaatatgtattaatcagattacgttctggtgaggtacgtatgattttatctacttgccgtgctacaatcggtcaagttggtaacttacaacatgaacttgttaacgctggtaaagctggtcgttcaagatggaaaggtatccgtccaacagttcgtggttctgtaatgaaccctaacgatcacccacacggtggtggtgaaggtcgtgctcctatcggtagaccatctccaatgtcaccatggggtaaaccaacgcttggtaagaaaacacgtcgcggtaaaaaatcatctgataaacttatcgttcgtggacgtaagagaaaataataacaacttatttgagtgtgcggcttaacagctgcacgcacacaataagaagggaggcgcccaaatggctcgtagtattaaaaaaggacctttcgttgatgatcatttaatgaaaaaagtagaagctcaagacggaagtgaaaagaaacaagtaattaaaacatggtcacgtcgttctacaattttcccaaatttcatcggtcatacttttgcagtatatgatggtcgtaaacatgtacctgtttatgtaactgaagatatggttggtcacaaattaggtgaatttgctccaactcgtacatttaaaggacatgcagctgacgataagaaaactagtagataataatatatataagtagaggaggatatcctaatggaagcaaaagcggttgctagaacaatcagaatcgcacctcgtaaagtaagattagttcttgacttaattagaggtaaaaatgctggagaagctattgctattttaaaattaactaataaagcttcatcaccagtaattgaaaaagtattaatgtccgctttagcaaatgctgaacataactatgacatgaatacagatgaattagttgttaaagaagcatatgcaaatgaaggaccaactttaaaacgtttccgtccacgtgcacaaggtcgtgcaagtgcaatcaacaaacgtacaagccacattacaatcgtcgtaagtgacggtaaagaagaagctaaagaagcttaataactatttaaggagggaatactgtgggtcaaaaaattaatcctatcggacttcgtgttggagttatccgtgattgggaagctaaatggtacgctgaaaaagatttcgcttctttattacacgaagatttaagaatccgtaaattcattgataacgaattaaaagaagcgtcagtttctcacgttgaaattgaacgtgctgctaaccgtattaacatcgcaatccacactggtaaacctggtatggtaattggtaaaggcggttcagaaattgaaaaacttcgtaataaattaaataacttaactgataaaaaagtacacatcaacgttgtggaaattaaaaaagttgatatagatgctcgtttagtagcagaaaatatcgcacgtcaattagaaaatcgtgcttcattccgtcgtgtacaaaaacaagctataactagagctatgaaacttggtgcaaaaggtatcaaaactcaagtatcaggtcgtttaggcggagctgacatcgctcgtgctgaacaatattcagaaggaactgttccacttcatactttacgtgctgacattgattatgcacatgctgaagcagacactacttatggtaaattaggtgttaaagtatggatttatcgtggtgaagttcttcctactaagaatactagtgaaggaggaaaataataatgttactaccaaaacgtgttaaatatcgtcgtcaacatcgtccaaaaacaactggtcgttctaaaggcggtaactttgtaacatttggtgagtatggtttacaagctacaacaacttcttggatcacatctcgtcaaatcgaatctgctcgtatcgctatgacacgttacatgaaacgtggcgggaaagtttggattaaaatcttcccacatacgccttacactaaaaaacctttagaagtacgtatgggtgctggtaaaggtgctgttgaaggctggatcgcagttgtaaaaccaggtcgtattttattcgaaatcgctggtgtatctgaagatgtagctcgtgaagcattacgtttagcaagtcacaaacttccagtgaaaactaagtttgtaaaacgtgaagaattgggtggtgaaacaaatgaaagctaaggaaattagagacttaaccacttcagaaatcgaagaacaaatcaaatcttcaaaagaagagctttttaacctacgctttcagttagctacaggtcaattagaagaaactgcacgtattcgtacagttagaaaaacaattgcacgtctaaaaactgttgctcgtgaaagagaaattgaacaaagtaaagctaatcaataaagtataagaaagaggaggttacaaaagtgagtgaaagaaacgatcgtaaagtttatgtaggtaaagttgtttctgataaaatggacaaaacaattactgtacttgttgaaacttacaaaacacacaaattatacggtaaacgagtaaaatactctaaaaaatataaaactcatgatgaaaacaattcagctaaattaggagatattgttagaattcaagaaactcgtcctttatcagcatcgaaacgtttccgtttagtagaaattgttgaagaatcagtaattatttaatacaagattagagataagggaggtttaactaatgatccaacaagaaacgcgtttaaaagtagcagacaactctggtgctcgtgaagtacttacaatcaaagtattaggtggatctggtcgcaaaacagcgaacattggcgatatcatcgtatgtactgttaaaaatgcaacaccaggtggcgttgttaaaaaaggcgacgttgtgaaagctgttgttgttagaactaaatcaggcgtacgtcgtaacgatggttcttatatcaaatttgatgaaaatgcatgtgtcattattcgtgatgacaaaggcccacgtggtactcgtatctttggtcctgttgctcgtgaattacgtgaaggtaacttcatgaaaatcgtatcattagcaccagaagtactataatttattaaaaccataatatttaaggaggtgcccacatgcatatcaaaaaaggtgacaacgttaaagttatcgcaggtaaagataaaggtaaagaaggtaaagtaatcactactgaacctaaaaaagaccgcgtcgttgtggaaggtgttaacgttattaaaaaacaccaaaaaccaaatcaattaaatcctgaaggtggaatcttagaaacagaggcagcaatccatgtttctaacgtacaattattagatcctaaaacaaatgaacctactcgtgttggttacaaatttgtagatggtaaaaaagttcgtatcgctaaaaaatctggcgaagaaatcaaatctaataattaataactagttgaaaggaggatccactttgaaccgtttaaaagaaagatacaatactgaagttactcaaaacttagttaaaaaattcaactatagttcagtaatggaagtaccaaaaatcgaaaaaatcgttgtaaatatgggtgttggtgatgcagttcaaaactctaaagtgttagataatgctgttgaagagttagaattaatcactggacaaaaaccattaatcactaaagctaaaaaatcagttgcaacattccgtttacgtgaaggtatgccaatcggtgcaaaagtaacacttcgcggagaaagaatgtatgaattcttagataaattaatcgcagtttcattacctcgtgtacgtgacttccaaggtgtttctaaaacagctttcgatggtcgtggtaactacactttaggaattaaagaacaattaattttcccagaaatcgattatgataaagtaagtaaagtaagaggaatggatattgttatcgtaacaactgctaacactgacgaggaagctcgtgaattgttaacaaacttcggtatgccatttcgtaaataatctctaaaaggaggctaattaagtggctaaaacttctatggttgctaagcaacagaaaaaacaaaaatatgcagtacgtgaatatactcgttgtgaacgctgtggtcgtccacattctgtatatcgtaaatttaaattatgccgtatttgtttccgtgaattagcttataaaggccaaattcctggcgtacgtaaagctagctggtaagatcaaagagtttgaaaggaggcaacaataaatgactatgacagatccaatcgcagatatgcttactcgtgtaagaaacgcaaacatggtgcgtcacgagaaattagaattacctgcatcaaatattaaaaaacaaattgctgaaatcttaaaaaatgaaggtttcattaaaaacgtagaatacgttgaagatgataaacaaggtgttattcgtttattcttaaaatatggtcaaaacaatgaacgtgttatcacaggattaaaacgtatctcaaaaccaggtttacgtgtatatgctaaagcgaacgaagtgcctaaagtattaaatggtttaggtatcgcattagtttcaacttctgaaggtgtcatcactgataaagaagctagaaaacgtaacgttggtggagaaatcatcgcatacgtttggtaataataaataaggaggtgccataacatgagtcgtgttggtaagaaaattattgacatccctagtgacgttacagtaacttttgacggacaaactgctactgtaaaaggtcctaaaggtgaattaactagaacttttgatgaaagaatgacttttaaacaagatgaaaacactctagaagttgtaagacctactgattctaaagaagatagaacagttcacggtacaactcgtgcgttattaaataatatggtacaaggtgtttctcaaggttttgtaaaaactcttgaacttgttggtgtaggttaccgtgctcaaatgcaaggtaatgacttaatattaaacgttggttactctcatcctgttgaaattaaagctgaagatggcattactttcgcagtagagaaaaatacaactgttacagtatctggtgtatctaaagaacaagttggagctatcgcttctaatattcgttcagtaagacctccagaaccttataaaggaaaaggtattcgttaccaaggtgaatatgttcgccgtaaagaaggtaaaactggtaaataatagataactctctaaagaaaggagtaatacaatgatcagtaaaattgataaaaacaaagtgcgtttgaaaagacatgctcgtgtgcgtactaaattatcaggtacagctgaaaaaccacgtttaaatgtatatcgttcaaacaaacacatttacgcacaaattattgatgatgctaaaggtgaaactttagtacaagcttcatctcaagataaagatatcgctagtgattctacttctaaagttgatttatcaactaaagttggtgaagtaatcgctaaaaaagcttcagataaaggtatcaaagaaatcgtatttgatcgtggtggttatttatatcatggtcgcgttaaagcgttagctgaagctgcgagagaaaacggattagaattttaatttaaaggagggacaaatacatggctcgtagagaagaagaaacgaaagaatttgaagaacgcgttgttacaattaatcgtgttgctaaagttgttaaaggtggacgtcgtttccgtttcactgcattagtagtagtaggagataaaaatggtcgtgtaggtttcggtactggtaaagctcaagaggtaccagaagctattaaaaaagctgtagaagcagctaaaaaagatttagtagtagttccacgtgtagaaggaacaactcctcacactatcactggccgttatggttctggtagcgtatttatgaaaccagctgcacctggtacaggagttatcgctggtggtccagtacgtgccgtattagaattagcaggtatcactgatatcttaagtaaatcattaggttcaaatacacctatcaacatggtacgtgcgacattaaatggtttacaaaaccttaaaaacgctgaagatgttgcgaaattacgtggcaaatcagtagaagaattatataattaaggagggaaaataaataatggctaaattacaaattaccctcactcgtagtgttattggtcgtcctgaaacacaacgtaaaactgttgaagcgttaggtcttaaaaagactaatagttcagtagttgttgaagataaccctgcaattcgtgggcaaatcaacaaagttaaacacttattaacagttgaagaaaaataattaaggaggtgcctaaataatgaaattacatgagttaaaatcagctgaaggttcacgtcgtgtacgtaaccgtgtaggtcgtggtgctggttcaggtaatggtaaaactagtgctcgcggtcaaaaaggtcaaaaagcacgttcaggtggtagcgtaagaccaggatttgaaggtggacaattacctttattccgtcgtttaccaaaacgaggtttcactaacattaatcgtaaagaatatgctattgttaatttagaccaacttaatcaatttgaagatggtactgaagtaactccagctttattagttgaaactggtgtggttaagaatgaaaaatctggtattaaagtactaggcaacggttcacttgataaaaaattgacagtgaaagctcacaaattctcagcttcagcggttgaagctatcgatgctaaaggtggagcacacgaggtgatttaatgtttcaaacgtttatgagcttctttaaaactaaagaagttcgaaacaagattttcttcacattagcaatgttagtaatattcaaaataggaacttatattccggctcctggagttaatcctgagccttttgaacagcaaggttctgatcaaggtgtcgctgctcttcttaatacgtttggtggcggagccttaaagaacttttctatctttgctatgggtataatgccgtacatcactgcttctatcgtaatgcaattattacaaatggacattgtccctaaatttactgaatgggctaaacaaggtgaagtaggtaaaagaaaacttagcaatgtaacacgttatttcgctattatattggcatttatacaatcaattggtatggcatttcaatttaataactatttaggcggtaaattgattattcatcaatctgtcatgagttatttattgattgctgtagttttaacaactggaactgcatttttaatttggcttggtgatcaaattacacaatttggtgtaggtaatggtatttcaatcattatctttgcaggtattttatcgacgttgccatcatcaattatccaatttgtgcaacaagcatttgttggtaatgacgatacaacgttagcatggttaaaagttattggtttaattgttggattaattttattaacaattggagcgatttatgtattggaagcgaaacgtaaaattccaattcaatatgctaaaaaacaatctgcacaacgtttaggatcacaagcaacatatctacctttaaaagtaaactctgcaggggttattccagtcatctttgcgatggcattcttcttattgccaagaacattaacattgttcttccctaaagctgattgggcgcaaaatattgcagaatatgctaacccttcaaacacttatggtatgattgtttatgtcatattaattattgcatttgcatatttttatgcttttgttcaagttaatcctgaaaaaatggctgataacttgaaaaaacaaggtagttatgtaccaggaattagacctggagaacaaacaaaaaaatatattactaaagtactttatcgcttaacttttgtaggctctattttcttagcagttattgctattcttccaattatagcgacaaaatttatgaatttacctcaatcaattcaaattggtggtacaagtttattaatcgttattggtgtagcaattgaaactatgaaatcacttgaagcacaagtgagtcaaaaagaatataaaggctttggtggtagataatttgtaggagggcaatttatgaatatcattttaatgggtttacctggagctggtaaaggtactcaagcgagtgaaattgttaagaaattcccaataccacatatatctactggtgacatgttcagaaaagcgattaaagatgaaactgatttaggtaaagaagctaaatcatacatggatcgtggagaattagtccctgatgaagttactgtaggtatcgttaaagaaagaatttctgaagacgatgcaaaaaaaggtttcttattagatggattccctagaacgattgagcaagctgaagcattaaacaacattatgtctgagcttgacagaaatattgatgctgttatcaatattgaagttcctgaggaagagctaatgaatcgtcttacaggtcgtcgtatctgtgagaaatgtggtacaacttatcatcttgtatttaatcctccaaaggttgatggtgtttgtgatatcgatggtggaaaactttatcaacgtaaagatgataatccagaaacagtatctaatcgtttaagcgttaatgttaaacaatctaagccaattttagagtattacgatgaaaaaggcgtattgaaaaacattgatggtgcgaaagatattgacgaagtaaccaaagatgtcattgatatcttagatcaattaaaatagatcaactaatgtgcgatctagatttatgtgaactttgattaggtttctctggcaagaatttattttttgagtgtcgtatgacgatcataattcccgcattttgttaaacttataataactattcactatattagattcgtatcgttgaagttgtctattgacgattaccttactattgtaaaaagggggaagttaatcaatggcgaaacaagatgtaatagaattagaaggtacagtacttgatactttaccaaatgctatgtttaaagtagaattagaaaatggtcatgaaattttagcacatgtaagtggtaaaattagaatgaattatattcgtattctacctggcgacaaagtaacagtagaaatgtctccgtatgatttatcacgcggcagaattacgtatcgttataaataatcgtcactccataatatagggaggtataaaaatgaaagtaagaccatcagtaaaacctatttgcgaaaaatgtaaagtcattaaacgtaaaggtaaagttatggtaatttgtgacaatcctaaacacaaacaaagacaaggttaataaaagagaggtgtaaaaatatatggcacgtattgcaggagtagatattccacgtgaaaaacgcgtagttatttcattaacttacgtatatggtatcggtacttcaacagctaaaaaaattgttgaagaagctaacgtatcagctgatacacgtgtaaaagatttaacagatgacgaattaggtcgtatccgtgaagtagttgacggttataaagtagaaggtgacttacgccgtgaacaaaacttaaacattaaacgtttaatggaaatttcatcataccgtggtattcgccaccgtcgtggtttaccagttcgtggtcaaaaaactaaaaacaatgctcgtactcgtaaaggcccagttaaaactgtagctaataagaaaaaataataggtaaaggaggcaaaatataaatggcacgtaaacaagtatctcgtaaacgtagagttaaaaagaatattgaaaatggtgtagcacacatccgttcaacattcaacaatacaatcgtaactatcactgatgaatttggtaatgctttatcttggtcatcagctggtgcattaggtttcaaaggatcaaaaaaatcaacaccattcgctgctcaaatggcatctgaaactgcttcaaaatcagcaatggaacatggtttgaaaactgttgaagtaacagtaaaaggacctggaccaggtcgtgaatcagcgattcgtgcattacaatcagctggtttagaagtaacagcaatcagagacgttactccagtacctcacaacggttgtcgtccaccaaaacgtcgtcgcgtataatttttattgatggttatgattacaaatcactgagcgaaacaattttaaaattaattcgacgttattaaggaggattttgtaaatgatagaaattgaaaaacctagaattgagacaattgaaattagtgaagatgctaaattcggtaagttcgttgttgaaccacttgaacgtggctacggtactacactaggaaactccttacgtcgtatcctactatcttcattaccaggtgcagcggttaagtacatcgaaattgaaggtgttttacacgaattttcagctatagacaatgttgttgaagatgtttctacaattattatgaacatcaaaaaattagcattgaaaatctattctgaagaagataaaacattagaaattgatgtgagagatgaaggcgaagtaacagcaagtgatattactcacgatagtgatgttgaagttctaaatccagaacttaaaattgcgacagtgtctaaaggtggacatttaaaaattcgtcttgttgctaataagggtagaggttacgcattagcagaacaaaataatactagtgatttaccaattggtgtaattcctgtagattcactatattcacctgttgaacgtgtaaactatacagttgaaaatacacgtgtaggtcaaagtagtgattttgataaattaactttagatgtttggactaatggttcaattactccacaagagtctgtttcattagctgctaaaattatgactgaacatttaaatattttcgttggtcttacagatgaagcgcaaaatgctgaaatcatgattgaaaaagaagaagatcaaaaagaaaaagtacttgaaatgtctatcgaagaattagacttatcagtacgttcatacaactgtttaaaacgtgcaggtatcaattctgttcaagaattagctgacaagtctgaagctgatatgatgaaagtgcgtaatttaggtcgtaaatctcttgaagaagttaaatataaattagaagatttaggattaggtttaagaaaagaagattaataggttaaaggaggttaactcatgggttacagaaaattaggtcgtacttctgatcaacgtaaagctatgttacgtgacttagctacatcacttatcgtaagtgagcgtattgaaactacagaagctcgtgcaaaagaagttcgtagtgttgttgagaaattaatcactttaggtaaaaaaggtgacttagcatctcgtcgtaatgctgctaaaacattacgtaatgttgaaatcttaaatgaagatgaaactacacaaactgcacttcaaaaattatttggtgaaattgctgaacgttatgcagaacgtcaaggtggatacactcgtattcttaaagtaggtcctcgtcgtggtgacggtgctgaatcagttatcatcgaattagtagattaattttatatataaatacactaactacttgtatttaaagcaaatgagtgcaacgataatgtttgccacatacaaatattgtctagctcagagtaccccatcaactaaatactaatataaagcgtgaactcaactaaaatgtgatggggtgcgcgcttttttaattttaatgaatctatactgattaaaaagagtcgtgcttttgaggcatgactctttttatatatgaaagacatttactcatgtacatctagtttttattcatgtaaactattgtagtaactattaataaaggaggaaggctgtgaaaactgataataacaatatcatcgaacttaaacatgtacattttcaatatcaaaacgatgcggccttcactttagaagatgtgtcatttaatataccaaaacatcaatggacatccattgtaggacataatggttcagggaaatctacaattgcaaaacttatagtaggtatagaacaagcaactgaaggagaaattttttataacaatcatttagttactcctgattatttaagagaggttagacgccatattggtattgtctttcaaaatccagaaaatcaatttgtaggttcaattgtggaatatgatgtagcttttggactcgagaatcacgcagtatctcatgacaaaatgaaagcaatcgtcattcaatctttagataatgtagatatgaaagaatatatggaatatgaaccacattctttatcgggaggccaaaagcaacgcgtggctattgcaggagtcttagcactaagtccagatgtcatcattcttgatgaagcaacctctatgttagatccccaaggtaaacagtctttactttcattaattaaacaagttaaacaagaaaaaaatttaacgattatttctattactcatgatttaagtgaagcgttagaaagcgatcatgtcgtcattatgaataaaggcaaagtttacaaagaaggtaagccaaattttatttttttaaatacacagtatttagtagagattggcttagatttaccatttgcaatgaaaatgaatcaaaagctaggctttaaagatgaattcactacatatgaagggctggttgataaattatgaccattcaatttaatcatgtttcatatatttatcaaaaaggcactccttatgaatatcaagccttaaatgatatcaatctcaaaattgagcaaggtaaatactatgcgattgttggtcaaacaggaagtggtaaatccacactcatccaacattttaatgggctattaaaaccaacaaaaggtagtattacttttgataataaggagattactcataaaacaaaagacaagcatctacgagaattaagacaacaagtaggtttggtttttcaatttcctgaatcacaattgtttgaagatagtgtggaaagagaagtagcatttggtcctaaaaattttaagatgaatgtggaacaagttaagtcttatgcgtatcagttactcttagatttaggttttgatcatcatattatggaacaatcgccatttgaaatgtcaggtggtcagatgcgtaaaattgcattagtttctatccttgcaatgaaaccgaatataattattcttgatgagcctactgctggacttgacccaaaaagtcgtcagcaagtgatggaattaataaaatcaattcaagtcaatcatcataaaacagtcatattagtgtcacacgatatgaatgatgtggcgcgatatgctgaagaaatcattgtaatgagacaagggaaagtaatagaacagtgctctcctaaatcattattcagacaacacaaaaaactgaaagattggcatattgcattgcctgatgtagtacaactgcaatatgattttgaagataaatatcaaaccatgtttaatgatattgccttaaatgaagatgagtttgtaacattgtatcaggagtggcaagaacatgaaaaataaacttattataggacgttatttacctaataactctgtgatacatcgtcttgatcctagagcaaagttaatttttgtatttgtatttattatttttatcttttttgctcattcttttgctacattcgcttgggtaatattattaattctatgttttatgaaaatggctaaaattcaattttggtttttaattaaaggattaacaccgatatttttcttcttaatctttacgtttgtaatgcacatattctttactcacggcgggactacgctattagaaataggttttattaaaattgatagtacaggggtattagaaggtgtttttatttctttaagattaataacgattgttatggttgcgacaattatgacattatcaacaagtccaattgacttgactgatgcttttgaaaagttaatggccccattgaaactatttaaaattcctgtgcatcaattaagtatgattatgtcaattgctttaaggtttattccaacattgatggatgaattagataaaattatccttgctcaaaaatcaagaggttctgaaatcagttcggggagtttaatgacaagaattaaagctttcatcccattaatgataccgctatttatttctgcctttcaaagagctgatgaattagccattgcaatggaagttagaggatatgatgctaatgtacaacgtacaagttatcgtaagttgtcatggcataagagagatactttgagtctattcagtctgatacctattggaatgatattatttatattaaaatatatgggagtgtaagacattgcgcatactagtaaatattgcgtatcaaggacatggatttcttggttttcaaattcaacaacaaggtagaactgttcaacaacaatttgaaaaaattttaaaacgtatgcatcgccgacatgtgcgtatacatccatcaagtcgcacagatcgtggtgtgcatgcttatgaacagtattttcattttgacacagaattgaatattgagcctaaacaatggaaatatgcgatgaatagtgcgttacctgaggatatttacgtgaatagtgtaaaacaagtagatgacacgtttcattgtcgttatgattgtgtaggtaagagatatcgctataaagtgtatcaagcggaacatcgcaatccatttgaaagtggtcttaagacatttataaaagatgacttagatttagataagatgaatgaagcggctaaacactttattggaactcatgattttactggattttgttcacaaaagactgaagttgaaagtaaagaacgtacactataccaaagtgaagttgtaaaaacggacgaaggttttgactatatcgtcacaggttctggtttcttatataatatggtgcgtgtacttgtagcttttttagtagaagtaggtaaagggaagcgacaacctaacgaagttcctgagctgcttaaagctaaaaatagagataatgtgccttttacagcacccgctgaaggattatatcttgaaaagatatatttagatccagaagcacttaaaaatgactttggtgaggatgtaaaaatacattataaaaaatcattacaaaatgactaatatgcattgacaaatgggtttataaaatataagatagttaacggtattgttttatatcatcccacgataagccccggaaacttattgtgttacaagatatataagcagattagacaggaataaaataaatgaacattacgctttgaaatcgtaacagaatgacctagattgcaggcctcgttcgtaggttcgactgcgatgagtacctgtaatctaagacgaagcatttatttttaggaggataattattatgcgtcaaacatttatggcaaatgaatcaaacattgagcgcaaatggtatgttatcgatgctgaaggccaaacattaggtcgtttatcatcagaagtagcatctatcttacgcggtaaaaataaagtaacttatacaccacacgttgatactggtgactatgtaatcatcatcaacgctgaaaaaatcgaattaactggtaaaaaagaacaagataaagtttactaccgtcattcaaatcacccaggtggtattaaatcagtgactgctggtgaattaaaacgtaataaccctgctcgtttacttgaaacttctatcaaaggaatgttaccaagttcacgtttaggtgaaaaacaaggtaaaaaattatttgtatatagtggcgctgaacacccacacactgcacaacaaccagaaaactacgaattacgtggttaattagaaggaggaaattacattggcacaagttgaatatagaggcacaggccgtcgtaaaaactcagtagcacgtgtacgtttagtaccaggtgaaggtaatatcactgttaacgatcgtgacgtacgcgaatacttaccattcgaatcattaatcttagacttaaaccaaccattcgatgttacagaaactaaaggtaactatgatgtattagttaacgtatacggtggtggtttcactggacaagctcaagctatccgtcatggtatcgctcgtgcattattagaagctgatccagaatacagaggttctttaaaacgcgcaggtttattaactcgtgacccacgtatgaaagaacgtaaaaaaccaggtcttaaaaaagcacgtcgttctccacaattctcaaaacgttaatattggaattgttgcaaacttgtttgcttacaagttcagtatgcaaattgcgtcagcaatttgtgttccattagaacgattaaagcacttctcaactttgagaagtgcttttttatacataggaaaaactaatggagcaatagtcatatttaatacagttatcgactacttaacatgttaaaaacgtctaagacagatgtcttaggctgatatatctttttattttttcatcacttcttcaacaacttcggtcatatcactgtgaataactaaattagctttcctatcatatggtgtagcgtctctattaataattacaagattgtctcctgtaaagttagaaataaagccagcagcaggttgtacgaccaaggatgaacctaacacaatgacagtatctgctttttggattttatctaatgctctaaagacagtaggctgatcgagcatttcaccgtataatacgatatcagggcgaatgacatcaccgcagttctcacaatatcttaatttgtgttccataacatatgatttcgtatattcttttccacaattgatgcaataaaagcgattcagtgtaccatgaatttcatcaatatgttcacttccagcatcttcatgtaacccatcgatattttgggtaatcacacctaaagatttgccttctttttctaactctgcaatccattcatggacgatattaggttttttatctgctactagtagtcgtttatgataaaagtcgataaagctttctttattatcatttaaatgatcaatacttaataaatattcaggtgaataaccctcttttgaaatttcatcaaataatccacccatggaacgaaaatcaggtataccacttgcaaccgatacacctgcaccagtaaaaaatacaattttgtttgatttatcaacaatttcttttaatttttcaattttattactcaatctgagcacctcgtttataataatgactaatataacttttttaaaatgaattttatactattattacaacatatttttacctttattttctagttttaaaacaagtaatagtatagaatgaaattgcgcttaaaatctttatgagatatatgtgttcattttatatggacatgtttaataaaataagttggatgtgagaatttgaatgaataaatacgatcgtttagaagaaattactaaactcgtaaatcaaaaaggaacagttaggacaaatgaaatcgttgaggatcttaatgtatctgacatgacagtacgtcgtgatttagctgaactagaagaaaaaggattactaactaaaatacatggtggtgcacgtagtaattcagcttttcaaattaaagaaaagtctcatcaagaaaagcacacagagaatattgaagaaaaacgtgctgtcgcaaggaaagctgttaacttaattgaagaaaacgatacgatttttttaggacctggaacaacaatcgagttactagctcaattaatagaacgagagtcattaactgtgattacgaattgttttccagtatttcaaatattatttgaaaagcgttcgctaaattttaaagtttacttattaggtggagaaatgagagaacttactgaatcatttgtaggtgaaatgacaaatacgctccttaaaacaaaacgatttagtaaaatgttttttagttgtaatggagtaaaagatgcagatgtactcacttctacaattgacgaagcgtatacacaacaacttgcacttcatcgttcacttgaaaaatacttattaattgatacttcaaaaattggaaaagaagattttactcaattatgtcatttagaagatttaacggcagtagttgtagataaaaatgatgaagataatgtacaaaaattaaaagcttacacagaagtgatacattaattgaatgataccaagattgtttatttaaacaatcttggtatttttttagataattgaatgcaattaaacataaaaataaaatattttgtttaaaaaatgaaacttcaaacaatattcgaacatttattgttgattatttgtttatttatgtttataatttaggtgtaaagatttgaaagcgctttttcaaacacatgtgtttaattatcttattttcaaaggagaatcattatgacaatttttattggttcagatgtcgctggtcaacgtcttaaagatgttataaaaacatttttaaaagaaaataaccatgatgtagtagatgtaacagaaggaaaagaattagactttgtagattcaacattagcagttgtacacgaagtacaaaagaacgatgataatttaggaattgcagtggatgcttatggtgcaggtagttttattgttgctacaaaagtaaaaggaatgattgctgctgaagtatcagatgaacgttcagcatatatgacacgtagtcacaacaatgcacgcatgattacaatgggtgctgaaattgtaggcgatacattagctaaaaatattgctaaagaatttgtaaatggacactatgatggcggacgtcaccaaatccgcgtagatatgttaaataaaatgtgctaattggaggaataaataatgaaaattgctataggttgcgatcacattgtaactgatacaaaaatggaagtttcacaacacttaaaagctcaaggacacgaagttattgatgtaggtacgtatgattttacacgtacacattatcctatcttcggtaaaaaagtaggagaaaaagttgctagtggagaagcagatttaggcgtatgtatttgtggtactggcgttggtattagtaatgcagcaaacaaagtcccaggtgtaagaacagcattagtacgtgatatgacatcagcactttattcaaaagaagaattaaatgctaatgttgttagtttcggcggtaaagtagcaggcgaattatttattttcgatatcgttgatgcatttattaaagcggaatacaaacctactgaagaaaataaaaaattaattgctaaaattaatcatttagaagcacataacgataatcaagctaatcctcacttctttgatgaattcttagaaaaatgggacaagggtgaatatcacgattaaggaagatgtgaaatgattctaacattaactttaaatccttcagttgatatctcttacccattagaacagtttcatctagatactgtgaatagagttaaaaagacgagtaaaactgctggaggaaaaggattaaatgtaacacgtgtattatcagaatttggcgaaaatgtgttagcaagtggctttttaggtggcgcattaggtcaatttattgaagaacaattaatggatgctcaaattgaacagtctttcttcaaaataaaaggagaaacgcgaaattgtatcgctattctacatgaaggacaacaaactgaaatactcgaacaaggaccaactattgacaaggaagaagcagaaagctataaagcacatcttttagaactatttaaaagagctaatgttatagcgatgtctggaagtttacctaaaggtcttaacacaaattactacgctgatattgtgaaattagcaaatgaacaaggtctacctacgattttagatagttctggtcaatcattaatggatgtattgttgagcgaaaataagccttcagtgacaaaacctaatattgatgaattatctcaattattacacactactgtcactacagatatcgatagtttaaaagaagcggttactcaacccatcttcaaaggtattgaatggattattgtttctttaggtggcgatggcgctttcgctaaacatcatcaaacattttataaagtaaatattccaaaaatagaagtcgttaatcctgtagggtctggtgactctacagtggcaggtattgcctcaggtcttgttcatcaacaatccgatgaagatttactgaaaaaagctaatgcatttggaatgttaaatgcaatggagcatcaaacaggtcatatcaatgtagataaatttaaagaactattcaaacaaattgaagttatagaggtgtaattcatgacaaaatcacaacaaaaactagcatcaatcgaacaattaagtaatcaagatgggattatttcagctttagcatttgaccaacgtggggcattaaaaagaatgatggctgaacatcaaacagaacctcctacagttgaacaaatcgaacaattaaaagtacttgtatcagaagagttaacacaatatgcatcttctattcttttagatcctgaatatggcttacctgcttctgatgcacgtaataaagagtgtggtttattacttgcatatgaaaaaactggatatgacgtgaatgcaaaaggtcgtttaccagattgcttagtagaatggtctgctaaacgtttaaaagaacagggtgccaatgcagttaaattcttactttattatgatgtagatgattcagaagaaattaacattcaaaagaaagcttatattgaacgaattggttcagaatgtgttgctgaagacattccatttttcttagaagtgttaacttatgatgataatattccagataataaaagtgctgaatttgcaaaagtaaaacctcgtaaagtaaatgaagcaatgaagttattctctgaaaatcgattcaatgttgatgtgcttaaagttgaagtacccgtaaatatgaattttgtcgaaggatttacagagggtgaagttgtatacacaaaagaagaagcagcacaacatttccgtgatcaagaagcagcgacacatttaccttatatttatttaagtgctggtgtatcagctgaattattccaagacacattaacatttgcacatgatgcaggtgcacatttcaatggtgtgttatgtgggcgtgcgacatggtctggtgcagttaaagtttatattgaacaaggagaacaagctgcaagagaatggttacgtacaactggatataaaaacattgatgatttaaataaagtactaaaaacaactgcaacatcttggaaagcaaaataacttaggggaggttattcatatgaatagagaagaagtacaattacttggttttgaaattgtcgcatatgcaggagatgcacgttcaaaattattagaggcattaaacgctgctaatgaaggtgattttgataaagctgaacaacttactgaggaagcaaatgaatgtattgcaaatgcacataaagctcaaacgaacttattagctcaagaagcgcaaggtgatgacattgcatttagtattacaatgattcacggacaagaccatttaatgacaacgttattattaaaagatttaatgaagcatttaattgaattatacaaaaaagggagctgacccctatgaataagttaatagcatggatagaaaaaggaaagccgttctttgaaaaaatatctcgtaatatttatttaagagcgattcgtgatggatttattgcagcaattccaattatcttgttctcaagtatatttattttaatcacatatgtacctaacgtgtttggctttacttggagtaaaacgatggaaggtatattgatgaaaccatataactataccatgggtattgttggtttaagctaaaaaagagctagaaacattgatatgacggcgttcctaactcttgatgatatgaattgaatacgttttgaatacgtgattactaaaaactaacataatttgcgaacttttcggccactttctcacgctgcttttctgtaacgtgtgcatatattcccattgtcgtttgtatatccccgtgacctaatctatcttgtacctcttgaacagataagcccgcttcaaataataatgaacagtgtgtatgtctaaagccatgtactgttatccttttaaaattattcttcttacatatcaaattcaaagtttcattagcatatactctatttagtcgtttattcgtttctacattcgtgaatatttcttgatgtttgctagatgtattatgaccgtgtttaagagataacacacgttgttgagtacgccactcttttaatacttctaaggttttactatcaacgctgatcgttctaatagatgaacgagttttaggagtatctataaactgtctatgatttaagccctctgcaagcgtcttattcacgcttaacgtctgattagtaaaatctatatcattccatgttaaagccattaattcgccacgtctgataccagtaaaggcaagtgtacgaaatagagcatgatgtaatacattatcttttacaagctctaaaaactgctgtaattcatcacttgtatagtatttcattgtttcgtgcttttgattacttttcttacgtggtgcttttatgtgattaaatggattatcagttatgatttttaaactgatagcatactcaaagatagtagacgcatatatacgcccctttttcgtttctgaatatgttcgataccactcattcactactttttggcaatgtggcacagtaatatctttaatagccatatccttaaagtgtgggagtatcatcattttaaacgttgtcattgcttgctgataggtgctttcttttactgtatttctatattgttctaaccatagttcatatatttgcttaaatgtcattatttcagtgtttaagaagccgttagcttgtacttctgtttgtagcttagcttctgcaattttggcctctctctcagttttaaagccacgtcttgttgtccgcttctgcttacgagtaatcggatcaacaccgagatatgcaacaaacatatacgccgttgagccgtctttctttttatatttcttaatcattgtaaatcaatcctttctacttgcccgcatgcgtttgattggattgaacacacctttgagaatggttactcattggtgcggtaatagtaataatattgttgtaagtgaatttataggagggtaggcgagctacccaataattattcttgaaataataagcaatgtaacttataatgtgattaagataactcgagaaggattaacgctgggtcccaaaaaggggtaggtgcatacgcactgagcattcctatgtgcctggggttatctttttttattttttaaactatcaactaaactatcaacaaatttagttgggttcttttttatttcattaacgatgaattcaataaattgttgggaataggtaaaagattgttgttttcctattgtatgcttaaatgcatatttttcttcattttttatattataaaaatcaattattaaatttaatacatattgattgaaacctttagaatatgacatatttatatttttctttttcaatctttcattgactgcagttatgacatttttaaatgaatatttatgtgtatctgacggatctttatattcttttactacatcgactttgttatcagaacctttatgaatagctactgtaaaatcagcattttctgtctttttagtaatataaaggttttgtctaatcccaattgaaaatttatctgaattatattccttgctcaacacatctatctcattagtttcttttattaatttttcagcaatttcaggtgggtatttcaattttatttgttcgttagataatggctcgtagctagcagagatagttaaaaagttttgcgaaatattttcggaaacatcttttttgtgaaatctcatagtttcattaatgtaattcattacacacgcttggaatagtggagcatacttaacttcatattcttgagttataaaatgagtacttatatttcttaaatctacaattttttccagatttaatctaattcgagtattataatcaggatagattgatttaatggcattatttaaactaattgttctttctggattatcttcataataaatactttctccgcgattcaatagttctgcttttaacattaattcccatgcattacatataaagaaggaaaagccctcaattctatatttaattgttggtttattatatatttccaaacctaaaataaaagattcaatgcttttatcaactaattgtttacttaagttttccatctctcaacctcctttaattaattactcatcatcttctaataaatttgttacattaaccgttatttcttttgtagtagggttaatgcttacatcctctccatatcctaatgattttacttgaatagtatcgtttactaattttaatgctatttcaacatgttgataatcttgcaaaattaacaaagtatcttcatttgtcacaacatcatgtgatccttttccgttaatagtaactttccagtcattgaagtacattctatctttctcctttaattaaatttaaatataaacgactatgtaatgctatattagtgtgtaaatagtatgtatgaactcgtaagcagaagtgagagagttaatcagtgatttgtgagtatctttctattaaagtgtctatatctttaagtatattaatattaatataatcacttaattcagaagattctaatacagtatttttaaatgtatagtcagtaggataactgttttttactattcctaaaaagttttcaaaatctgctttttcatcttcagttaatctattttcattagacaatatagcattaaactttaataattcatttataacatgagcaataaaatgtatattatttgatttattatcctcaattgtaatccttttttcgatttcaaaatctctaaatatataataattgtttattatgtcacttactgttatattttcattgtttaaatactttttgtatatttcattaccttgtgaaattatctgtagtgttttgaaattgtaatttttgaagctgctaattattcttttagctttttccattaactcgcttataattaaatctaaattattagtagcaaattctaataactcattataatcatatacgtgttctctctcagtagaaaattcacttaaattaaatgttatatacagattgtatttagtgaatatttgttgatataaatacgtttctcccttactattcaatcctgataaatcatatttgtcactttttaaagaaaaacgtttttgcaagaaattaataggatcgccatataataaataatctacaccaatatttccaagctcagctatttgtttgagtctttttttgttaggtaaatttgcaccattttcccattttgaaacgttacttttacttacgttaaataattttccaaaatcacttaaatctttcccgttagctatacgaatttttttaatccgttgtcctacctttagtttatcgatttcactcatattattacctccaaaaaaattatactatatcaaaataaatatttaaacctatagttgagaaaaattgagtattagttattgcaatttaattctaagtttgataaattagatttataaagttgagaggagttgagtttatgattaataaaatagctggctatagaaagatgataggaaaatcacaaaaggaaatggcaaaaaaatttgatatttctgtgcaagcttattcaaaaaaagaaaatggtttaataccttttaaagatagcgaaaaagttatatttaagaatttactattaccatatttcccagatataacaattgatgatattttttttagtcaaatgttgagtaatgttgagtttaaggaggtttctaaatgagtgaacaatctattctaagtgagtccgcttctttagaattagcaaacggtatcttaaaacttgccgaacagatagcgcagagaaagatagagcaacaacaaaagagatgggctacacaaacagaattaagaaagttatacagatgtacccatagtgatattaccgagtgggaacgtttaggacttactaaacgaaagcaaggtcgcagttattattatgatctcaaagaagtcgaagaatttttactatcacaaaaaaaataaattatctaagtcccgcatgttaataatttgtgattgaacgatagtattaattcaactttaaggtggtgtttaaattgattagatttctgaatgaactcgcttatatatgtgtaattaccatatttctaaatatgtattctgaattgcattatgcgttagtatttttcttatttgggagtatgattgcaacacttaaatttgatatgagagatgaagaacattcatatctctataaaacatacagacagcatttaagaaagaactaaagaaaaaagcattagaaaaagctaataaaaataatccaaatcacaataacaatggttttggttcagctgaaccaaaacgattaaaccagtaaagtgttcgctttagttcaactgaaccaaagcgtgaagatcatgaaacttatgaattagaaaaattatttttattaattagattaaaaattgaaataatggaggagctaaataatgaattgggaaacaagaaatttaattgatgaatttgaattagtgaaagaaaaatatcaagacttattgcaagcacaaggctggtttatagaagattaccttattcatgaaagaagtcatcaattaactaaagacgaggtaattatgcatggaatgaaataccatgagcatagaattaatattaaacaatttgatgaattactaagggtttacactaatgaattaagcaacattattgaacagttcaaaaaaatagataaaaaagaaacgtcatctgatatgaatagtttggcgactaaatcagataacgcgaataactaaaaaactaataaactactgaaaggatagcattttatgactaataaaatcaagtgttctaaaggttatggcgtaattatgcaaagtgttatgtctagcaaagatataagtatagaagctaaagcattgtattgctattacatggcacatgtgggcgacaatattatcccaagtgctacacagacatgcaatgatttgatgatcagttacaagcgttttaaaacactacgaacacaattatttgaaagaggctttttgtagattgataaaaattagcagcaaaggagggcagaatattggcaacatatagagtgaaaaaagaaagtggtaattttgtaaccattcataaaggctttataactgacgatagattatcagctaaagcaaaaggtattttattgtatttattaagtcgtcctgatgattggcaaatatatacattagaagtagtaaagcatatgaatgacgggcagaagtcaatcaatagtggtattaacgaacttattaaagttggttatgtagaacgtagtcgaaaacgtaaagataatggtgattttaatggttacgattatgcagtgtatgaaaaaccaaaaaacattcgcgaaatgccatttggggaaaacgcgaaacgcgaaaatgccaaacgcataaatgcgaaacgcgaaaacgcgaaagggcacactactaatattaataatacctataaggatttaactaataattatgatactgaaattaatagtagtagtagtgcaagcactactaaacaacaaccaccgtcacattcttatagtaatgtattcaacttttaccaagaaaatggatttggaatacttcaaccatttgtagtggatcagattgaaaactggatagatgatttcaacggtaatgaacatatcgttatagaagcattaaaagaagcagcaacaaataacgtgtgtaagtggagctatgctaacagtattcttaaaagttggtatcaagacggtattaagtctattgatgatatagaagcacgtagaaaacagcgtgaagcaagtaaaaataaaactgaatctacaaaaacattcgataactctcaatacgctgatttattttaggagggaagatacttgaaaagtattaatgatattgatttaaaaagcaaaatgcgtagtgaactgattgaagaacaatataaccttaaatgtgataaatgcaaaaacatatatagttatcataaattcagaaagtcagacggtacaattcaaataatcagaaacgggtgcgaatgtgaatccattgagaaaggaaaacaaagcagaagccagcacaaagcaaatcaaaaacgcttgaatattgaaaaagtatttaagcaatccatgatgaatgatgatttattaaaagctgaatttgataattataaaccaactaataaaaacttattagaagctaagcaaattctacaaaagtatgcagctaactttaaaccagataaaccaaagtcgctacttttacaggggagttatggcataggcaaaagtcatttagctatgtcggttgtaagagaagtcaaaaagaaaggctatacagctttattcttagatgttactgaattagtaaaagcctatcgaaatacctacaacaagaatgtagcaatgactgaaaaagaattagatcaaatgattagagatgtagatttgcttgtaatagatgattacggaacaacagtaaacgattatggaaatgaaaaactattttcactaacagacatgagaacaggtaaaagcaacatcataacaactaatcgtgaagcattagaactttctaacaatgacgataaagcaaaaagatttagtcgtttgatgaaaaacacacaaattataaaaatgcatggtacagattatagattaaaagattttaaagcataagtggtaacgggttgaatacccgttccgcttctcagaaaggagtaacacatagtatggcaagtctaaaacaagcgtatcaacaagacacagacgccgaagaaatcgaaatgattagtgatgatacgttattcacagtttacaatcctaaatttattgaagataaaaagcagatgatagaggagtatatcgaaacattatacgaacgcaatacaccaaacatggcatgtgatccagtaactcaaatggtttactatcaatcgcaaaatttagaaagcctagttatgtacatcattgaagaaaaagagaagttgagtgcgtttatcagaaaaagtaatagaaacctatatcatttatacgctgttttagaggactatacaaagcaagaacagatatttataaagaattacatcagaaatacaaaggtgcgtgataatgagcttgtgagacgctttaaaattgatttatataactatgttcaagctgaaagagagaaaagacaagaagaacttaacaaaaagtcatttaatgcgtacttagtggataaagacgaagtaaggaaaagacaacaaaagaaaaagattaataatggttatggcttaacactcaatcaagagaaagagctgcgattaattaaagaacacgaagaagaacgaaatacagatatgggggtattcattaacttaattcaacagatgaacaatgatgaactcttatcttatgtgttagaacgtcatgagtttaatattgatagttataatctcaaaatattaactgacgcagcactctaccgcttgccattgaaacagagaaaacaagcctataaccatttaaaagcaataacaagaacactagcaaataatccaatcgaaaagaggttaaaacgatatgaacaatgatgaaatgaataaattaagtgaagcattagaactatcagaatcacaaagattagcattatataactatagtgaacgagaatctaaagaaaaagcacaatcacaagaacaaaagaaagaattaagcagcttagaaaagcatgagaaacgccaacaaatcatgtctattaaagacgctaaccaacgccaagaagaaatagcgaagcatgttgaattatttaaataggagggctattcttgaaaacattaaaacaaattgaagtgcataaaaagaatattgaaagctatcaaaaggatatacaagcactagaacaagaagttaatagtgaaaaagaaaagattgatcaacttaatgcagactatcaagaattagtagtaagtggccaagttgaaaaagctgataaattatatactaagattgataagcaagaaacgacacataaagcaaaagtaaaacgtttaagtgttatgaagcaatcactgaaacaagtcattattaaaaattgtagcagcatgcaagaagaagccgataaattaagtgatgaatatattgatatttactatgatgatttacaacactataacaagctcaaagaagaactagaacaagcagaacagaaactagaagaacataacaatagttatctacttaatcaacgtaatttaagccattatatagatagattaacgagagaaaacaatattcaaccaactgagtttatgggtagcgtcaatagtcgcaaaccattttatatttaatcaatgtagcctacttttatagtgggcttattttatagtttagcgaggtattacatgaaaaaattaacaactaaacaaagacgttttgcagatgagtatatagaaacgggtaatccttattattcagccgtaaaagtgggatatagcgaagtatacgcaagagataatgctttaaaattattggaaaatattagtgtgaaatcctatatacatgagcgtttagaagaaataaagaatgataatatgaccgagaaatacggagttatgcgttatttaacaagattaataaaataggcgataatttgttaggagggataaaatgaagtcattaacgttaaaacaaaagcaattcgcagatgaatatataagaacaggcaatgcttatcagtcagctattaatgtaggttatagcgaaaagtatgcaaaagctagaagccataagatgttggaaaatgtcggaataaatcaatatatagatgataacttagaaattattcaaaaagaaagtatagctgaagctgatgagatcatgcgttacctaacacgagtacttagagccgaagaaaaagaagagatattagtatacgtgggcgacggtatgcaagaaatccaaacaatacgacctagtgccaaagacagaataaaagcagcagaattattagggaaacgttatcgtatgtggacggataagcaagaggtagaaattactacacctatttttatagatgatgtgccagaagaagattaaagaatgattatgaaaatagtacttactcaattttgagtaggtgcttttttattaagtttttgactaaccaaaactattgctcaaaaagaatataagcatatttttattaataaataattaagatattagtattttacagtaccccttattctgtatttagtattaaataagagtttaatttgttagtatctaaagtaaagatttgtttttctattttttaattttagcttttatttgcgttctaagagccattaaataaaaatatatatgaaattctctaaatgctctaaaaagcaccttaaaattgcaaataagggtatttaaaatttaaatagtccttgtgataaagttcttctaaaaaggagtgataattttgaaatggattttgtttagtatacaaatgattttggcaataattttggtgttctttgcttataaacaaatgaatcaaaaccatttagattcttggtttggcatttatgtggtacttttcatgatttttgtatattggaatgctaaacgttatcacaattattaaaggatgcatttatgccgagaaaatttattgatcgttgagaagaactattttggaataaagcaatttcattttttgagaagaaaacaaaaggagtttttgcatgaaattaggaaattacaaaattgattcgttttatataattatgattataggttttttagttacttctatatttttcccttttatgcttttatctgttcttattttattgattattggtttagaaaaagatgataaaaagggttaaatttgatttcttggtttttgaaacgtgttgaaaacgagtttctttttgttttgatttttgatgtagtattaatttttatatctgtgctacaacaccgattacttaaaactaatgtaaaaaagctgactaaaattgaagaagttgcaaataaaggtattttataattttaaaactcttatgataaagtttgctaaaaggagtgacataagtggataagattaattactttttaaaagcattagtattagcaatcatgcttcgttgtacaatgaattatgtgctcccaacacctgaaaagttatcttttaaacttttggatggacttatctttggtgtgttagtgtgccttttaattaattggtttattggtatttttaagaaatcttcacaaaaatagaccatgcatgtatttcgagaaaatttattgaggttaactaaacttggagacgaatgtcgatatagcgtgagctattaaaccgaccattcgacaagttttgggattgttaagggttccgaggctcaacgtcaataaagcaataaggtttattaatctaaaaataaaaggagtttttaattttgaaaaaagctttatttcttttactagatgaatttgcagattgggaaggagcatatttatcttcaattttaaatcaagatgataattggtctgtaagtactatttctgttgaagaaaatgtatcttctttaggtggtttttctgttttggtagattatattattggggaggaacctaaagattatgatctgttagttatgattggaggtaattcttgggataatgattctgagaaccttttaaaatttgttgaggaagcatttaataaaaatatagtaattggtgctatatgtggagcagttgattatttagctagaaatggttttttaaacaaatataaacatactggtaattcggtttatatttggcaaaattataaaaaatataaacctgagaatgaatttttagaaaagcaaagtgttgttgataatatgcttataacagcaaatggtacagcatcacttgaatttactgaatcaattttaagagagattgattttgattctgataaaaatattgaaaagacaatatttatgaataggtttggtttttataagtattgtgaaaaatacggaaatccatatttataaagttgggagtatttgggtttttagaaacaagttgaaaacgagtttcttcttgtcttgatactatatagaaatattgcaaagatgaaaaataatgtaagtatgacgtgaaaaatttttatttataaaaagtaagcgttttctatttacatgtagagccttttataagataataaatgtagctactgaaattactactcaaaatcgagtatcctttaaaatgactgtatcctttgggtacagtctttttgtttataacttgtcaaaactttacatttcataaagttacaaacggacttaaaagtccacttgtaaccagtaccttaaaatagggaagtggtttaaccagtccaaatgtgttcatatgtggacttattaccattttttaatatcctcaaatttgaggatattaatttattgctcaatctaaatgtactgagtaaatatactttctcagctcaaaagtgagctcagtaatataagtggatttactgaaaccaaatttgggctaagtgaatatattgaaagttatattccgcttctaaatgctgatacgccaagttaccgtatcagaaattcaaatatagacttattaatcaatttaatagctgacgcactaagttagtgcattagaaaaccgaaatgtcggttctctaattctgaaaagtcgtttatagcttttctgcgtagtcgaaatggcaacgcagctatttactatctaaacgacgacctatgtatcctaaaatagcaccaacaacaaacaaagatacaacgtaagctaagttaattaattgattatctgtattaagcataggttgaatataaaaagtagcaatgagaacgattatagcgaatattacgactgcaattaatctatacttcattttatacacctcaacgtttaatagtatctataactttataatacattatctaatatgatctcatggcgcaaatgtgaggagtgagaatgtaaataatttatagatactgtaaaaattgtagacaattaataaatttaatgcgtataatgatattagaagttgttcccttatgaagcacttctatatttttctatatgtgagtcatttttcttggctatgtccattgggcatagctttttattttattgtaaacaaatatataaataatgagataatagcaaaatagatttaataatctctaaaatccttaacatatagagttttcactctacctcaactataatggggctaaccttaattggttagcttctttttttgcgtaaaaaagcactctcaacttagcttatgacggactaagtgagagtgtagatgaaaagtaaggagtgaaacatttttattataatattataatagtgtggctaaataaaaattagtgtgtaataatgataattgagattgtctaactggcgactctttcctttccactaagtatttcttctccattgaaaatactgtatgtttaggcaatctcgacactttaaaagctttcataaatcgcataactctttaggggcgtaaagcccctttttgtatgcgaaaaagtctcactagtacatgactagtaagactaagttcaatgaaagaaatgttgtctataacttatattaacatacagccgcttcaattaatacaattacgtttgtattatactaacgtaaccattcgtgacgttagctgcatgaacaattcgttcagtcaggtataaaagggagtaggaaaacacgacgccttttattagttgatctaaataaggactgaacgaaacgttccccccttattcatggggtcgtgaaacgctaccccatagatgagtgaacaaaacgttcccccatatgtcgcaacttgcgacgttaggtaaatgaatatagcaaccgcttcgatacataggcatattctcaatttagacatatattaatacacgggtacagtcctaaattgggattgcagcattaaccagcttgtcaatttagcaagttggttttatttagttcatatataagtaataaaataaaagtaatagtagataaataattttacaaaatttctaaaaacaaagtatacttaagatgtaaaaagttgtttgtttttaaaaaacttgataagcgagggaacattatggattttactaaaattattatacctaatgatttaacaagatttaataaaagcgatttagacgatttagccacagagttagacatgctaagtgatatagataataaatctgaattagcagtagaaatatacaaacagtttaagcaaaagcaagacttaagtgacaattttaaagaaataattaacaataaattactagcgggaagaacagcaacaaaatggtttaaaagtgaagatgaattaaaattcgaagaagtacttgaagcattatcaagtaataatcgaaatgcaattaatgatatagatacttcaaaagtaggttataatgaaaatctgatgactagcccgagtatatttgcaattatttttgataaagaacaagaacaaatgtttatcagattcgtatataaaaatggaattcgacatgaagtaaacggtactaatattagtaaaagattaattccagcatattctactttgtatatagattttaaaaaacaattaattgaatatcgtggtgatgctaaaaaatcaaagaaaactatttctagttttataagaaatataaataaaacaaatagtaactttgaagctaaggaaaaatttagtttttcagtcgaaaatgttgccgacaaattaagcggagagttgattgacacaatatcattacctgatgctaatgtaaaaattgacaacaagaaattaaaaggaattactgaagttctagaagctatagatggttactttgaaaataaaaatatagagaaattgggaactgctttacaagatataaatgaattatttgataataacattgataataatataatgccattttcatcgctattactctctggtttggaaactgtaggattgggaagtaataaagaacttagggatactccattgtataaatacttaaatactaacctaactcaaactacaggatttataagaattcaagttacagaaaataatgtagtaaatgattacactataagagtaggaattcaaactaaaagtatatatttcacttcagatgtgaatgaaaatgtgattaaatatgttagggataatttatttaattgacatatattaaggtaggtgtgaagaatggctctaaactttgcaattcgtaaagaattagatgaatttttagatactattgcattaactgacattgagaaatttagtccaagtaaagtttctaaatatgcaggtattagtattgatgaggcatttaaatggttattagagcatgtagccgatgaagaattggagctactatgggaaattagatgtccaaattgtaatagggtacttactttaaatagtaagaaagactttgaagaatatgaatgcgatttttgttatgatgattttgatgtagaagcaaacgatttatatcctaaattcagagtttctaagaaatataaagattatttactagcaaagggaagagctgttaactctgaaaaaaagttaagtaaaactattactaatgtagatgatgatattcctctatctgatcttaatttagatgaagaaatgatacgaaatataaaagagttttcaccaaaagtttttaattttatatggaatggagatatttatatgaataacagtaacaacaacaataacaacaacaataacaacaataatattagtgatagttttaataattctaaagtagataatagtagtattcaaagtacaaatgttaatcaagaaatattaatccctaaacaacaagttgaagatttagaggattatatacaaaaaatagatgatgaagatttaagacaaatgaatgaagaatttttagataattttaaagcttcattaaaaaaatatgacaaagaaaatgcaaaaaaatggattggctatattaaaaatacagtgaatgctccaatagtacagacaatacttgaaaatttaaattaacatacggacaagttaaatatctcatttcaaacgtcactcttgtagtggcgtttttattttgaatacgttttgaatacgttatttaaaaattaatagcaatctataataatgatatagctacaaaatactgtcatatcaacgtttataaatagttaaaaatacatataaaaagtacaaactaaaccatgggaattgttggtttgattgtagctggaacaacagctaagtctttaaccgattcctacaacaggaaattagataaaaccaatcaaattaactttatttctacaatgatggctgcgatgagtggatttttattcttagcagcagatcctattaaagagggtggatttttaagtgcatttatgggcacaaaaggattattaacagcctttatttcagcctttattaccgtaattgtttataatttctttattaaaagaaatattacaataaaaatgcctaaagaagtgccaccaaatatttctcaggtatttaaagatatcttcccgttgtcagcggttattatcattatttatgcattagatttattatcaagaacatttattcatacaaatgtagcgaacgccgtattaaaagtctttgaaccattatttactgcggcagatggctggattggtgtcacacttatcttcggtgctttcgcattcttctggtttgtaggtatacatggtccatctattgttgaaccagcaatcgctgcaattacttatgcaaatcttgaaacaaacttaaatttgattcaagcaggagaacatgcagataaaattattacacctggtacacaaatgttcgttgcaactatggggggtaccggtgctacattagtcgtgccatttatgtttatgtggttaactaaatcaaaaagaaataaagccattggtagagcatcagttgtaccaacattctttggagtaaatgaaccaattttatttggtgcaccactcgtattaaacccagtatttttcataccatttatttttgcaccaatagtaaacgtatggatctttaaattctttgttgatgtacttaaaatgaatagttttagcatcttcttaccatggacgacaccagggcctcttggtattgtgatgggtacaggatttgcattttggtcatttgtgttagcaattgtattaatcgtagttgacgttatgatttattatccatttttaaaagtatatgatgaacaaattcttgaagaagaacgaggcaacaaagaagtaaataatgaattaaaagaaaaagtatccgcaaactttgatacgaaaaaagcagatgcaattttagcaactgctggtgcaaatgaagcgacaacaactgaactagcaccttccgatgaggaagtatcggctaaagagtcaccaaattcaattaacgaacaaactaacgttttagtcttatgtaccggtggcggtacaagtggattacttgcaaatgcgttaaacaaggcagctgaagaatatcagatacctgtaaaagcggcagctggtggttatggtgcacatatggatattatgaaagactatcaattaattattttagcgcctcaagttgcttctaactatgaagatataaaacaagatacagatcgattaggtattaaattagcaaaaactcaaggtgttgaatacattaacttaactcgtgatggcaaagcagcattagacttcgttcaacaacaatttgaaaaataattaggagatgaaagtataatgaaaaaattaccagaagattttatttttggtggtgcaacagcagcttatcaagcagaaggtgcgactcaaacagacggaaaaggtcgtgtagcctgggacacttatctagaagaaaactattggtatacagctgaacctgcaagtgacttttatcataaatatccagttgatttagaattaagtgagaaatttggtgttaatggtattcgtatatctatcgcgtggtcaagaatttttccaacaggttatggagaagttaatcaaaaaggtgtagaattctatcacaatttatttaaagagtgtcataaacgacacgttgaaccgtttgttacattacatcattttgatactccagaaacacttcacagtgatggagatttcttaaaccgtaaaacgattgattattttgtagactatgcaaaattctgctttgaagaatttactgaagtcaactattggactacttttaatgaaattggtcctattggtgatggccagtatttagtcggtaaattcccaccaggtattaagtatgattttgcaaaagtatttcaatctcatcataatatgatggtcgcacatgcgaaagcagttaaactatttaaagacaatggatataatggggaaattggagtcgttcatgcattaccaactaagtatccatatgatccttcaaatccggaagatgtaagagcagcagaacttgaagatattattcataataaatttatcttagatgcaacgtatttagggaaatattctcgtgaaactatggaaggtgtacaacatattctttctgtcaatggcggtaaattagatattaccgatgaagattatgctacattagatgctgcaaaagatttaaatgacttcttaggtatcaattactatatgagtgattggatgagaggatatgaaggagaatcagaaattacacacaatgctactggagataaaggtggctctaaatatcaacttaaaggtgtaggacaacgtgaatttgacatagatgttcctcgtactgattgggattggatgatttatccacaaggtctttatgatcaaattatgcgtgttataaaagattatcctaactatcataaaatttatgttactgaaaatgggcttgggtataaagatgaattcgacgaagaacgtaagacagttgatgatgatgcacgtatcgactatgttaaaaaacatcttgaagtcattgctgatgcgatacgtgatggtgccaatgtaaaaggctatttcttatggtcacttatggatgtgttctcatggtctaatggttatgaaaaacgttatggtctattctacgttgattttgacacacaagaacgtcatccgaaaaaaagtgcatattggtataaagcattagctgaatctaaagaaattaagtaattttataaatttgacaggacagaaatgaaattttctgtcctgtttcttattttattgagagactagtattaaaaaataaggagtataattttttcgtacattctatagagtatttatctttcacgtattttaagaaaaatgatgatcatcatccaccatttctgacactaaaaaagaagtcaatattgttagaacatataatggcgttcttaatttaaatgaaaaggtgaatgaaattcaagttgatcaaaatggcaaaccaaacaaaatgagtgaagatgataaaaagtgacttggattaaaaactatttataaaggtaaacaaatagaagatttaaacatttatgaagataattaaaatggtatgcattttgacgttaaagtatctaatagctcgtctcggccattaaaatctttgttagaagcaagtccaaaaacgtataaaaattcttaatatatagaatcaacgactcaacatagccaacttcatgaaaataaagatgttgcaaatgaaaacattaaagtttatgaaacaaataaaaattaggagcgttcataatactgactctcctaattatctagacaagcatgagctataagttcaattaatttagtacgatgagtatgtccgtatacattaggaagaatcatgatttcatcgacttcaaattcgttttgtaattgtattaactgctgagctacttcatgtggtaagccactaatcattcgacgtttatttttttctattttttctcgatctctttcagaataatggcgttgctgtgctgtttcaatagaaggatatactttaggttgtttaagataattaatacgtattaaccacaaatttaatgcatctactaattgcttaatcgttaattcattttctgccgtaacgacaaaagtagctaaaataatatagggtgaatgcgaatgaccatgatactctgtaaaacgcgatttataatgttgaatgacatgtgttaaatttgcgtgcgattgacccatatgagcaatcacaaaaggtaagcctttttttgcggcaagctcagcactttgttcactcattcctaaaataaacatctcaggtgaatgctctgtgtatggagtggcttctaaagttttgaaacgatgtgaatgaatagtgtcattcgtaaagtatttgttcaaatcatctacttgttgagatagtttgggtttttgagttttaaattcatttagcgcttcgtttacatttttgaagctaggagatcgcccaattcccatatcaattcggccaggatgtttgacttccataattttaaattgttctgcaactttgtaagcactataatgtgggagcataacaccgccacttccaatatgaatagagtgtgtatgttcaagtaacatagccattacgatttcaggagcgcttgatacaacagaaggaacttgatgatgttctgctacccaataacgtgcataaccaagtttctctgatagttgagcaagttcaattgaatgatttaaagcttcttgtggtgtatcaccttcaaagagtggtacatagtctaagatacttaatttcaagtttaagacctcactttgcttggtataataaagtattaagtgttatcatactagacattataaagtgaaagcagttgaattgcgataaaattgtttgtgatatgacactgtttttgaatactgaaaggagtcttttataatgaataatgagcaagttttattagcaaaatatcctaaaggtatgccccaagatgatacatttaaatatgaaaatattgacatagttgatccgaaagaaaatgaaattcaaattgaatctttatatatatctgtcgatccatatatgcgtggaagaatgactcaagccgattcttatgtggagccttttaaaattggcgaacctattcaaagtcacattgtaggcaaaattattaaatcaaattctgaaaaatttaatgaaggtgacattattgtaggtatgttgccatggaagcgtattaatacagtaaatgaagagaaaataagtaaaatatctaatacagatgtaccactttatttatatttaagtacgttaggtatgacaggtcaaacagcttatcatggtttattagagattggtcaaccaaaagaaggcgacactgtagtagtttcagcagcttctggtgcagtaggtgctgtggttggtcaaattgctaaaatcaaaggtgctacagtagtaggtatagctggtggagataaaaaagtgaattatctaacagaagaattgggttttgatgcaggcattgattataaaaaggatgattttgcagaagcattagcaaaagccgtaccgaatggcgtagatgtttattttgaaaatgtaggtggcacaatagccgatgaagttatgaaacatctcaaccgtcatgcacgtattcctgtttgcggtacgatttctaattataataatactgaacaagaaaaaggtccacgtgtacaaagcacattaattaaacatcaagcactgatgcgcggtttcttggtagcggaatttgccgatgactttgaacatgcaagtaaagaactggcaacgtggatacaagaaggaaaaattaaaacaaaagtatctatagaagaaggatttgaatatttaccaaaagcgttcagaaacttatttacaggtgaaaactttggcaaacagatcgttaaagtgtcagagagtgtataatttaaaattcagtaaaaggtaggtatataattatgaaagctataggatttaaacaaccatttaaattagaagaaggaaatgtatttgaaacatttgaattagatatgccccagccatcttctagagagttgcttgttaaaatacaaagtataagtgtaaatccggttgatacaaaacaacgccttactgaagttaaaagttctccgagaattttaggttttgatgcagtagggacggttcaaaaaactggaacagaggttacaatgtttaaggaaggcgatattgtattttattctggtgcgcctaatcaacatggttcaaatcaggaatatcaacttattgatgaacgattagtcgcaaaagcacctaaaaatctttcggcagaacaagctgctagtcttccgttaactggtattacagcgtcagaaactttatttgatgtgttcaaaatttcagaggatccaaatcaaaataaagggaaatcattacttattatcaatggcgcaggtggtgttggaagcattacgactcaaattgctaaggcatatggtctaaaagtcattacaactgcgtcacgtcaagaaacaatcgattggtcaaaaaagatgggtgcagatatcgtactcaatcataaagaagatttaaaatctcaattagaacaacagcacattgaagcggtagatttcgtattttgcacgtttgatacagacatgtattatgaaacaatgatagatatagtgaaaccaagaggacatgttgctacgattgtagcttttaaaggatcacaagatttaaatttattaaaaacaaaaagtatttcctttacacatgaatttatgtttacaagacctatttttcaaacagaagacatgattaaacatcattattatttagaggatattgctaaaaaaattgagaatagtacgtatcaaaatacaacgacaaaagtcatcaatggcttaacaacagaacatttatatgaagcacatcaaatattagaatccaattcaatgataggaaaacttgttataaatgtagaagaatagagaatgatttaacacctcttagtgtctataaataagacattaagaggcgtttttattattttataatatatcaatttgattaattataaaaattccaatatatcgttagatataacatgaatagggtatagtatttctaactatcagaaaggagaataatataatgcgaaaaaaatctataagcattgtattttggattgcattagctatctgtacattatttgtagtgtatggagcgatactacccaagcaattagaagcaatcacgcaaaatattacatcgtttattgcagttaatttttcttggtattatcttttactagttttaattatattttttatttgcgtatacttattattttcaagatatgcatccattacgttaggtgtggaaggagaagagccagaattttcattactttcttggtttgctatgttgttcagtgcaggaatgggaataggattagtgttttggactacagctgagccagttagtcatgcctataaagcgacgcctatacataaaattggtacacaagcagcaattaatgatgcgttccagtttgctttcttccattggggaattcatgcgtgggcagtgtatggcattgttgcattagtttttgcttattttaattttcataaaggatatccaggtttagtaagcgcaacgcttgttccgatttttggagaaaaaagaatgagaggaccaatcggaagtgctatagatgttttagctgttattgcaacggttacaggtgtagcagctaccttaggttttggtgctttacaaattaatgaaggtcttcactacttgtttaaagtaccgagtcatttcggcacacaagtcattattattattattgcaactattttatttagttggtctgcatggtccggaattgataagggaataaaaactttaagtaatattaatatgattttagcttttattgtattaataggattatttctagtaggacctactttatatattttaaatacatttactaacggattaggaaattatatttttaatttctttagtatgagtttgcgtattccaatggatggtggcgcaaaatttcaatgggtacaaaattggactatattttactgggcatggtgggtgtcttgggcaccatttgtaggaatattcattgcacgtgtatcacgtggtagaacaattaaagaatttattttaggagtgttatttgttccagctcttgtatctttctttttctttgcagtgttcggagaagcagcagtgtatcttcagcatagtggaattgctaatattgctaaagaagcaacagagactgcaacatttgccactttagagcattttccattgggatttgtattaagtattgttagtttaatcgttattatgattttctttgtaacttctgcagattcggctacttatgttcttggaatgttaagtagtaaaggaaatattaatcctagctctttcgttaaagtaagttgggggattattatggccttatttgcgatgataatgatttataccggaggaacacaagcaattcagaacttattaattattgcagcactcccattttccgtagttattattcttatgatatggtctttatttaaaacgttgagtttagatcatccgcgggtatcaaagaaaaatgttttaatgaaaaaagataatttacaatacaataaaacgaataatataaaaaacgaaaataattatgaaaaataggtttttattgtgttaaatttgggaatatttaatctagaaggtaaactttaataaatttaaaaaaattaaataaaaaattttaatgttaacgttttaaaaaatttttaaagggtacttaaattttataattaaataatttcaacaatgactaaggaggtgtgtttagaggtgcatagatttaaaaactttatccttggcctattaatagttgcgattgttggtttcttattgtttatgtacatagatgatagtcgtattaagcgttatcaagactatttcttacaattcaattggttccaaccattattaattggtttatctgctttactcgtattaattggtattatattggtatttagcatctttaaaccaacatatagaaaaccaggtctttataaagactataatgatggacatatttatgtatcacgtaaagcagtcgaaaagtctgcatacgatacattaactaaatacgatgaaatcagacaaccaaacgtggttactaaactttacaataagaaaagcaattcttacattgacattaaagctgatttcttagtgcctaatgatgtgcaagtaaaatcattaactgagagcattagatctgacattaaacataatgttgagcattttactgaaatgcctgttagaaaattagaaattaatgttagagatcaaaaatctgccggacaacgcgtactataagggagggataacatggctgataataatcaaaatagtcaagattctactcaacaaattatcgacttcctaaagtcgtataaatggcgaattataggtttctttgcattcttaattattgcaatcttattcctgactttagggttctggaaaacaattttaattattgttttatgtttaatcggaattggcgttgggtatatgaaagaccgtacacaagatttcatgaacttcttaaatcgatggagttaacattcattatttaagaattcatataaattaaaaaattaagtattaaaaattaaattttatttaaaaaggagaattcacatggctgtagataataacaaagctaaacaagcatataataaccaaactggagtaaatgaaaaagaaagagaagaacgtcaagaacaagcacaacaatacagagaagaacgtcaaaataatcaacaacattttgaaaataaattaacgttctctgatgaagttatcgaaaaaattgctggtatcgctgctcgtgaagtaagaggtatcttagatatgaaaggcggattcactgacagtatttctagcgcattctcaagcggtaacaacgtaacacaaggtgtttctgttgaagttggtgaaaaacaagcggctgtagacttaaaagtcatcttagaatacggtgaatcagctccaaaaatcttccgtaaagtaactgacttagttaaagaacaagttaaatacattactggtttagatgttgttgaagttaacatgcaagttgatgacgtaatgactaaaaaagaatgggcacaaaaaaaccaaaaaaataacaacaacaataacaataataacaacaataataatttcgaaagatcagatttacaataagtttattgaaaaaagaccttggaatgttccaaggtcttttttatagttaatatcattttttaacaagagacggaataacattcaattttaatgttattccgcttcttaattttaatgtagtggattattaactttaatataagtgtaatgatgtgcttcatcttctaaacgcatagtggttacacacttataatcaattgttgcagcaaataaagtatgagtaatcttttgtatacgtcctgtatcaacgtcagtcaacttagctaatatatcttgaataatatgactgatatgatgccacattattttttcaaaatccatattttctactttttcagtaattgttaatattaattcagctagatgattttgaacagttgaatagaatactttattaaaaacagatgtagtggattgagtaagaattctagatttcttatggaaatgtgatgttttataccccattttgtttaattgagtttcatcaatacgtaatccttcgaaatctcgaatatagattttacttaaactaccgtcttgattaaatgtagcaatagaattttgtaaatgtgcctctagcgcgattccatattttacatatagtggcataactattcctaataattgagtcgcataatcttgaatccatgcataagccgctttttcaaatgacttaaattgacgtgtaagttgatatcgttttattaagctttcaattggcggttcagtattgtttggataataagcaaccagactagaaggtatgacaggtattgtatcttcttcgattaatgtataaatattttctctaaataatgttcccagttgttcactacgttcagtttggattgttgaatgatctttagaattataaaaatgaatgccagcaatttcatctaatgtttctatgcgataaggttgaaaatcagggtcgttttttaaaatatcattcacaattttagtaactaaaggtccattatgcgttgtttgttcagaaagcgtccgtatttctccagtaatatgaacatttgtagaaagtttaatatgcgggaatagtttaggatattttggcattaatgttctgaatgataagccagcataataaggtaaggtcatatcaataggaataataagttgttcatctagttcttgttgatattgactaagtaaaatatgttcgaattgccaaggatggaccaccattaaatgataatcttcaattcttatattattatagttatttaaaaggtgagtaaataatttatgaaaagattggtgaagtgtatcattataggttgaagataaagattgaacatttgctatactattatgtatgaatacacattttaattggatttcttgaccgtattctgaactataatgaatattctctttagcactcatccctttacgaagctttgcgcctggatgaaggggatgaccttctataactgattgttccgaacgtaaataactatcgtcactttttgcaatcaattcccataaggattcgtagtttgaatgcatatgtttagcttgataacttagtgccagaatcatattagcagcactattatttaagtcttttctaaattgttcactagcagcgttatcaagctttggcgcttcagctaaaattaaatctagaatatcatttggatgttggattctttcatattcgtgattacgatgttttaagatataaaaggggccttccacatctacccggtcgaaggcatatctaccttttatttgactgtaaatatcgatatttgattttggaaaatgaatacataatacgtctttatctttagaaaacatagagacggttaatttggtaggtctaataatctgactattatctttagcgtgtattaagttttcacgatataaagatgtaataagacgttgagaaattttatctctacctattaaaatatattgtttaaaatgatcgattaaatcaggataaaattcatttaaatatgtataaacatcatattcttcattagtaagttgtaagttatgattattaatggttgtattttgattcatataacacctcatccacattctacaaaattataaatagtttgtataatatctaactctaaaattaaacctttttaaaagatagtttaaatttaagacacaatattttaataaattctaagttcatgtcattgctagtacccttaattaaatttataattattaaactagttaaacttaattatgaaaacgaatgataaggcggaggatttaaaaatgttaaacgagtggaagcatgcagatagaaatatgcaatatagagtgttaaatgctctaataaaggaaaatatatggactcattcaactaccatttttaaagaaaatcattatataacgattgagttcgaacaagtgcttctaaacgttcattataaatacgaaagtgcattatctcgatatgaatttgatgggccgataatatatatgaatcatcaacataaagaatcagtggatagtctagaaaaactattagacatactagtaacagactttcatattgatataccattccatttaaaaagtgaacttattcatagcagagatagtttcattgaagtatataaagcattcgatacacgtcatgagtatcttcaaagacatgataaatatataaatgcctcagaacgtttaaatttttttacttggctagaaaagttgaaaaaagataatgatatagatgacgtactatattctgaaagcttaatatttgaaggtcatcctacacatccacttactaaaacaaaattacctttatcaatgaaagaagtgagaacctattcgccagaatttgaaaagattattaatttgaaagtgatgctaatacataatgagtatgtaaatgttacaaccatttttgatcattctcagtttattttaaatgaggttattcctgaatatattgacgaattacatacattcatgaatgatagagaacgtttgcttaaagactataaagtcattttagttcacccatggcaatatgaacatactattcgtaataaatataaggagtggctacaagattatattttgatatctactccatttcaggttccatctaaagcaacatcttcttttagaacaatgtcgctaatcaatcatccttatcatgtgaaattaccagtcaatgttcaagctactagtgcagttagaacagtgtccccagaaacaacaattgatggacccaaattaagtcaagcattacatcgtgaattaaatcagtatacacaattagatgttgcacttgagccctatggtttatttgctaaaacagacagtgacgatgctagacaacttgcttgtattattcgtgaaaaaccttttacaaaagatgatggtattttattagttacaggtgcattagtaaataaaaatgtagtagataatgaaattacagtagatagttaccttaaatggattaatgatgatataaatcaacgtaccatacatcagtttatgcgaaattatactcgtcagctggtaacacctttattagctttaatacaagattatggtatagctttagaagcacatatgcaaaatacattagtgcatttaggaccaaagtatcaaatacaatttatagtccgagatctcgggggctctcgaatagatattaaaaccctaagtcaaaaattaaagcatattgaagtggaaaataaaagtttacttgcagactcaattgaagaagttattatgaaatttcaacacgcagtcgttcaaaatcaactggcagaattaatttttcattttaaaaagtatgactttataaaagaagaagaactttttaatataattcaagaagaaatagaagtagcaattaatgatactaagcctcatgcagatacattaagaaaagttttatttggacctacaattacagtaaaagcattgttgaaaatgagaatgaaaaagaaagtgaaaaaatatctgaatattagtttagataatccaataaaaagagaggtgaattaagtgtctcgtattgtaatcaatttatcaaagattgaatataatgcacatgtattaaaaatgttgtttgacagcaaaaatatagccattatacctgtgataaaaagtattgctggagatgaacatatcattaaacgattaatgaaagtaggatttaactactttgcagaatctcgactagaaaatatacctcagcaatttacaaaagattgtcaatttttacttttgagatctcctttaaagcgtcagtatgaagatttaattaaaaagagttacataagtattcaaacagaaatggtaacaatacgacagttaaatcatattgcaactgaaatgagtcatgaacatcaagttatattgatggttgattggaaagatcaacgtgaaggtgtattaccttgtcatatagttgaatatattaatgaaataaaacgaatgaataatataaaacttttaggtcttgcatttaatttcatgtgttttaaatctaaagccccaacattaaatgatatcgacaaaataaatcaatttgttcaccatgtacaatacaagacaggggtatcatttgaagttatttctggaggtaactcaagtatgcttccattgttaaaacaatatgatttaggatgtattaatgagttgagaataggagaaacattatttcgtggtgtggataccactactaatgaaaatatacctgaattatttcaaaatgcaatattacttgaagcggaaattattgaaattaaacctaggtatacaaagacgaaagaaagttacttacaagctattgtagatgtgggatatattgatactgtgattgaaaaaataaaaccactcaatcatcgaatagaaattatgggtgcttcaagtgatcatttaatgatagatttaaaagaagaaattaactataaagtaggagattgcataccattttcattagaatacgaagcgctatcacaactaatgtatcatcagagaatggaaaaatattatagtgaagaacaagctatttctcaacgtattaacaatttgaagcaatcaaaatatatcaacaatagataacttattatatagaatctgagacatcaatagtgtctcagatttttttatgcgttagctgtcaacgttttcgggatgagacaacgaattcaaaatgaattctgtgtcaattcctattttttattttttattgacaatgataatcgttatcactaaaataagaatatacatcaatacatattaaggagtgtcatcatgaaaagaacaacaatttttggaatcatttcaatattattgactttaatattaataactgcatgtggaaaggtaagtaacaatggttcaaaatcatctaatcacacatcatcttctaaagatactattgaaattaagcatgatttaggtacaactaaggtatcaaaaggtgctaagagaatagtagctttagaattctcatttgttgatgcattagcagctttgaatgttaagcctgtaggaatagcagatgataataaaaagaatagaatgattaaaccgttaagagataaaattggaaattatacatctgttggtacgcgtaaacaaccaaatttagaagaaataagtaaattaaaacctgatttaattattgccgacagtaatcgacataaaggaatttataaggaattaagtaaaattgctccaacaatagaattaaaaagctttgacggcgactataatgaaaatatcgaagcgtttaaagttatagctaaatctctcaataaagagaaacaaggtgacaaacgtttagacgaacataagaaaaaaatagttcaatataaacaagagattcaatttgataaaaatgaaaaggtacttccagctgtagcttctaagtctggattactagcgcatccaagcgaatcttatgtgggacagttattaggtgaattaggttttaaagaagccttaaataaagatgtgacgaaaggattaagtaaatatttacaaggaccttatttacaactcaattcagaaacattatctgaaatcaatccagaacgcatgtttattatgacaaatggtgcaagttctaatgaatcttcttatcaagaattgaaaaaagatcctatttggaacaaacttgatgcagttaaaaatcataaaatagatgtggttgatcgtgatacatgggcccgcgcacgtggtttaatctcttcagaagaaatggctaaagaaatcgtagaaatttcaaaaaaagacagaaataaatagggtggattaacaatggctatacaaaaaagtaatcgtctttctactaataaaaggtcaatcaagaagcgtatgacactcaccttttcagtgagtgtttgccttctttttatttttgcttatcttaatttagccactggaactttaaatattcaaactaaagatatgtatcattacttttttacttcaattgaaaacaagcagacgtttatcattcaaaatgttagaatgccaaggatgattgttggcatacttgtgggaggagctttagctctagctggtttactcatgcaatctataactagaaatccattagcatctccgcaaatatttggggtaaatgcgggtgcttcatttattatcgtattagtgacagtattaatgcctacgatgggaaactatgcaacctatttagcgtttattggggcatttattggtgggttaactgtgtatttattatctggttctacgaaaaaaataacaccattgaaattagctttagcaggaatggcagtacatttgttttttagtagtcttacacaaggtattattttacttaatgaagattctaattctactgttatgttttggttagttggctctttaaatggaatgaaatggaaagatgtaatgataatttgtccttggattcttatgggacttatcatactaattggatttgcaagacaacttacaataatggaattaggtgatacactagccaaaagtttaggtcaaaaaactgaagtgataagaatcattatcggattacttgttattatatttgctgggacatctgtttctattgtaggacctattggatttataggattaatcgtgccacatatagtaaaacgttatgcaccgcataattacttcattttaattccgttaacatttatagttggcgcaaatttattgttattatctgatacattgagtcgtttaattacatatccctatgaatcaccagttggaattgttacttcatttataggagcattttatttcttatttattactttaaggagagtgaaacgaatatgacacaccactcattagctattcgttatgcacttgtcgttactatattaatcataagtatatttattagcttatgcgtcggcgcaacaatgtatcatcccattaaagtaataaatagtttattgatacaagatgattttattctaaatgaatatcgtatacctagaacacttttaggattaatagtaggaagtagtttagctatttcaggaacaatcatacaaggggtagtaaaaaatcctctcgcttctccagatgttattggaatgactaaaggtgcgagtttagcagcgattattattattatggtttttcctaatgctcctttaatcattttacctataggttcatttgttggtgcactaataatcagtttaattttatcttttttaatatctcaatttaatattaaagggtctaccttggcattaattggcttagcaattggtgctatatgtacagcaattgtacaatttttactaatacgaaatcccatggatgcaaataatgcgcttatatggttaacaggtagtctctatggtcatacgatagaaaatgtatattcaattttaccttggtttattattacgattccaatcgtcattgctttaagtcatcaactcgatatcttaaacctaggagattcaatagcgatagcattaggtacacgaataaaacgtattaaaatgatactgttgattttatcagtgatgttagcaggatcatctatttcaatagttggaggaatcagttttcttggattaattgcgccacacatagctcgaaaaatcgtcggatatcgtcatgttcacgtcataatgatgtctggtttaattggagcaatcctcattttatttagtgatggattagcaagaggtattcatccgccacttgatataccagtaggcatagttattgccattgttggtgttccatactttttattgttacttagaagaatttaaatattaaaaagaatgagatagtattcacagtgaatgctatctcacatttttttgtgaaattttaaacttttgtatattgcaagttatttgaaaataagatatagtaaaatacatattgtttataaaaatacatataaagttatatttatataattaatgggcgttaatttcgatgaaaatacaaaataaatgaataaatacaattacctatacaaatagaaagaagggtgaatattggagaattataacaaacaggagaaaataaaaggaagaataaaatttatatcgatgtcaatcattggtattattttatttttaatacccgttccaattgtacaagatggggagaaacaaacaacattaccagtggcatttttggcaaattggttaaaagatttattaggtcctgcaatgtcaattctcattattacaatcattacgttatcgactattttgactattttattttcaacaattttaaagaataaagtaaaaccaggtggtcttatcgcgaatgcatttcaagttggcccagtgtggatgatattaagagtacttgcagttgtatttgtctggatgacttattttaaaattggaagtaaagtgatctattcagaagatacgggcggattagtatttaatgatttattacctacattagtagcagtattcctttttgctgccttatttttacctttattaatggaatacggtttattagaatttttaggaccattgtttagaccaatcatgagaccattatttactttaccaggacgatcagcagttgataatttagcctcatttataggagatggaacagtaggcgtgcttattacaagtcgtcaatatgaaaaaggtatttattcaaaaagagaatcaatagtaatttctacaacttttagtgttgtatcaatcacgtttgctattgttattgctcaaactattggattacaacaaaagttttttgtattttatttaacagtgatcgtttcttgcttagttgcagcgataatcatgccaagaatatggccactaaatcaaattcccgatgattttacgaaagaagtatctgaaagtacacgacttgaaaaacttccagaaggaaaaactgcattagctcatggttttgatgaagctacaattgtagggctaaaagcaccaggagttaaagaattttttaaaacgggaattaaaacggtaattgatatgtggtttgttattttaccagtagtgatgagtatagggactattgccacgataatagcaaattatacaccagtatttgaaatcataggaaaaccatttattcctatattacaattacttcaaattcctgaagctgcaaaagcgtctgaaactttacttattggttttgcagatatgtttttaccttctatcttaatagcgacggtacacagtgaattgacacgatttgtgattggtgctttaagtatatctcaattaatttatctatctgaagtgggcggtgtgattttaggttctaaaatcccggtcagtctcggaaaattatttatgatatttttaatcagaactgcaatcacattaccaattattgctttaatggcacatttattactataaaaaaagaagcagagtaaggattgatgaatgcaattccaattccttcctgcttcttttttctattctaaagttgatagtacgtttgcttttacaatttcacttgttactactggtgaatcttctgttgaagattttccagtatttttatgcgcttctttaaacgcatcactttgggtccaagctttgaagttttcttcactgtcccaccatgtattaacatacatattttcagtatcattagtattatcaatttgccaaacttcagtttttctgaaaccttctagttgttcaatcttaccacctttagtgaaacgtggtgccattttttcagcaaatcctttttttacagtaatacgatttgtaacaacaaacatagtcagacctccttacttatttattttaataatatacaaattcaaagatatatcaaataaaatacttgtaataaataagaaaaataaacgtttaaagaaagatatctatataccgaaaatatgttcgtattttaaggctatttatgttaatatatttttaataaaggagaagataaatgacaggaaaaacgcatgtagctgctggtttgcttgtaggagcaataacagttgaccattatcatacagatctattttctactgtaacagtaatttgtttagcaatatcaggaagtttacttccagatatttgtcatacaagaagtaagattggaagacaatttaaaattcttagtttgctcgttagtactatcttcggacatcgaacatttacgcattcattgttatttttaggtatgataggttttttacttattttaattcaaactccgacttattatttagttactattatcggtgcaatggcttctcatgttatactagatatgttgacacctagaggggtaaagttactttatccaatacctttatcgattaagtttccttttactttcaaaactggtggttttttagatgcatctttatcaacagcttttagtattggagcaatatacataatatttcaagagtttataaatgaaatcttgaaatatgtgagccattcattgtccggatgatatcaatgaatatgatagatcatctttcttgtcttaatatcaaatttataattaatatgataaatatatttgaatgacacgaactatctataaggagagttagtaatgctagatcaaagtaaattagaaaaatacaatcaagaacatttaattgaatatgagaaaatgatgagtagtaatgaaaaagaacaattagatgaaaaagtgaactcattagatttagaatttattcaagaactttatcaaagtttatatgttaatcgtaaaacaattacagatgttactgcagtttctgaagttgattataaaattaaggaagcattcacggagcaagatcgtgaatattatgaacataaaggaatagaagcaataagaaatggagaatttgctgttgttcttatggctggtggtcagggcacacgtttaggttataagggacctaaaggttcttttgaaattgaaggtataagcttatttgaacttcaagcaagacaactattgcatctaaaaaatgaaacaggacattgtattaattggtatattatgactagtgatattaatcatgaggaaacattacgttattttgaaaaccatgattattttggttataacccagaacgtattcacttttttaaacaagacaacattgtggctctaagtgaaaatggtagacttatttttaatgaaaaaggctatattatggaaacacctaatggtaatggcgggatatttaaatcgctagagcattatggttatttagataaaatggagaaagatggcgtaaagttcattttcttaaataatattgataatgtgttagtaaaggttcttgatcctgtatttgtagggtttacagtagtaaatgataaagatatcacatctaaatctattcaacctaaaaagggtgaaagtgtcggacgattagttagtaaagataataaagatactgtacttgaatactcagaacttgatgaaaatgtagcgaatacatttgataatgcaaatattggcattcacgcatttaagttatcgtttataaatcaagtggtaaataatgatttaccatatcatttagccattaaaaaattgaaacaactggatgacgactttggtttaattgaaaaaacatctttaaaatttgaactattttattttgatattttccgatatgcgaatagctttattacattacaagttccaagaaaagaagaattttcacctttgaaaaataaagagggaaaagacagtgtagaaactgcaactgatgatttaaaacgaatgaatgtaatttaaaggagggtggaatacgatgtctaaatcatctcagcatacaaaagataatgtaattgaatcatttaaagacatcattccactatcttttggcgaggaaattggtaatgcaacttcacatggtgttgctgcactaatgactttatttttactgccttatgtagcagtacatagttataatgagtatggaacactaagttctattagtgtttctatctttgttattagtattttcatgatgtttatttcttctactgtatatcattcaatgaaaaataatacatcgcataagtatatattaagaattattgaccatagtatgatatatgtagcaatttctggaacgtatacacctgtcttactaacagttgttggaggttggttaggatggctggtctttttgttattatggggaacaacaatatggggtattctatataagtcaatttcaactcatgtaaatcccaaattaagcttaatcgtatacttagttatgggatgggttggcattatatttttacctgtgattattattagaacatcttggttatttattttatttatcgtattaggtggtctttcttataccattggagcatggttttatgcacaaaaaaaccgtccatattttcatatgatatggcatatttttattgttatcgcatcactctttcattttataggaatcgtatattttatgtagacctagctgaaaggtcatatcattgagaataacttagtttattaagtgcttatttagaaacaggactatgaattcaaaaagaattctaccctgttttttctttttttaataatacattaaagttgtttacgaatataattaagaatattctatattatgaactttttaaatacataggagggcaaagatgaaattaaaatcaataggtattgtagtgactttggttttaacaatgtttatggcagcaattgaaagttcaattatttcactagcattgcctaccattcgtaaagatttgaatgctggtacagcagtgccattagtctttaccgtttattttatagcacttgttgtagcaaatcctattgtgggtgaacttctcacaagatttaagattctatatatagctgtagtcggcatactattatttggtattggaagttttatgtcaggtatgagtgaaacgtttacaatgttaattatttcaagagtcatacagggacttggcgcaggagttatgatgtctttgactcaaattgtaccaaaactagcatttgaaattccgcttcgttacaaaataatgggcatcgttggaagtgtctggggaatttcaagtattcttggaccgttattaggtggtggaatattagaagttgcaacatggcattggttgttttatatcaacatacccatagcattgatagctattgttttagcttttcttacttttcattttccagaagaagcggaagtacaacacatacactttgatgcaaaaggattatctttgttttatatatttatcggacttcttatgtttagtttattaaataaaacaggtgttacttttaatattattgcatttatactagcaatagttatattattcgttttattcaaatatgaaaataaaaaaaatatgccttttttaccaataagtgaatttaataaatcaatttcactggtatttataactgatttacttatagcaatatgtctaatggggtataacttatatatacctgtttatttacaagattatttaaaattatctccaatacaaagtggattagttatatttccactttctgttgcatggttagctttaaacttcaatttagctaaggtagaatcaaaattttcaagaaaaaaattatatatcggaactttcatatcattaattttaagtaatatgattttagtatttggacttcatattcctcttattattgcgggagctgtgattcttgcaggattgagttttgctttcgtttatactaaagacagtgtaattgtgcaagaagaaacaagtcctaaatatatgaaaaaaatgatgtcattctatgcattaactaaaaatttaggatcatctataggatctacattgatggggtcattatatgcacttcaatttggtttattaggaggtaacttttataatatattaactgtaatcacaattgttgcgcttatattaattttaatgtgggtatttttatttaaagagaataaagaaagtataaaataataattttaagttactatatataaatgataaagtatcattataaagtattattgatgaaaagaggaggaaagagaggaatgaaattttctaatcaaaaatttaacggtatctttccggctcttcttattcttattatttttattctatcaggttgtatatttttaatatttttaggatttgggttatttggattaagtcgaattcttatttttttaaaattaggattttttacatacaatagggatttattcagcaatttagtatattacggtagctatatagtatttggatactttttgctatttgctattgagcatttaatggattactttagaaaacaattacctaataatccatattttaatggaacactatttcatttaatttcatatgtaattacgactatcctattctattttgttattcatattcattacgtatatattaaaattgaattttgggttattgcattaattattggaatactatatttatgtaaaatgattttttatccagatagcgaagacttgaatgataagaagtagatataagttataaattcttgataaattcagcacagattgtaagtaaatttgttaaaatatgaatataaagaaacttaagggggataatgagttgttaacggtagaacaagtggaaaaaatagtgggaaacttaaaagatccaattattaatgtgcctttaaaagaaacaaagggaattgtagaagtaaaaataaaagaagaaattcaacatgtaagtgttaaagttgctatggctcaattaggtggacaaccacagcttgatttgcaaatgtcagtggttaaagctttaaaagaaaatggtgcaaatacagtgggcattcgttttgaggaactacctgctgaagttgtggaaaaatacacaggaaaagaaaaagaaaaacctaagacaattgaggggttattgtcacagaataatccagtggagtttattgcaattgcttctggtaaagggggagtaggaaaatcaactatagccgtaaacttagcagtagcattagcaagagaaggtaaaagagtaggactcatagatgctgacatttatggttttagtgttccagatatgatgggtatagatgaaaagcctggtgttcaaggaaaagagattattcctgtagaacgtcatggtgttaaagtgatttcaatggcatttttcgttgaagaaaatgcaccagttatttggcgtggtcctatgttaggaaaaatgttgacgaatttctttgttgaagttaaatggggagagttagattacttattacttgatttacctcctggaacaggggatgtagctcttgacgttcattcaatgttaccaagtagtaaagaaataatagtaaccacaccacatccaacagcagcatttgtagcagcaagagctggagctatggctaagcatacagagcattctattttaggtgttattgaaaatatgagttatttcgaaagtaaagaaactggaaaaaaagagtatgtatttggtaaaggtggaggacgtaaacttgcggacgagctaaatacccaattgttaggagaactacctcttgaacaaccttcttggaatcctaatgacttttcaccatctatttatcaagaagaagatcgattaggaaaaatctataaaacaattgcgcaaaaagtaattgctgcaacaataaaataataaataaaaattggtgtaaaagtgctcgaaaaaaatatcatttcgagcgctttttctattgcaaaatataaaaattctgatagaatatttttttgtgagcaagttaaaagaattgcttaaaacaaaaataaaattattaaaataatttgttgacactaaatgaattgtttgataagatataaaagtcgttttcaagaaatgttaatacattttaaaaaatgtaaattcggtgtaaaatttaccattgcgaaatcttggaaaacgatataaaatattaaaagtaatcaaaattagttattgactttcgaaattgaaattgatataatttgatagattacatttcaaatgaacattgaaaactgaatgacaatatgtcaacgttaattccaataaagtaacttaaatgttacaaacactatttagtattatgagctaatcaaacatcataaatttttatggagagtttgatcctggctcaggatgaacgctggcggcgtgcctaatacatgcaagtcgagcgaacagacgaggagcttgctcctttgacgttagcggcggacgggtgagtaacacgtgggtaacctacctataagactgggataacttcgggaaaccggagctaataccggataatatttcgaaccgcatggttcgagaggtggaagcgtggtgacacgtggagctgacgaatactaatcgattgaagacttaatcaatttttcaagttttgcgacgcaaatctttacttactatctagttttgaatgtataatcattcacttgtctggtgacaatggcaaggaggtcacacctgttcccatgccgaacacagaagttaagctccttagcgccgatggtagttggactgacgttccgctagagtaggacgttgccaggcataaatattattccgcagtagctcagtggtagagctatcggctgttaaccgatcggtcgtaggttcgaatcctacctgcggagccatggctccttggtcaagcggttaagacaccgccctttcacggcggtaacacgggttcgagtcccgtaggagtcatttatttggagaattagctcagctgggagagcatctgccttacaagcagagggtcggcggttcgaacccgtcattctccaccatttaaatatcggaggggtagcgaagtggctaaacgcggcggactgtaaatccgctccttcgggttcggcagttcgaatctgcccccctccaccatcttattgggctatagccaagcggtaaggcaacggactttgactccgtcacgcgctggttcgaatccagctagcccagccataagagccattagctcagttggtagagcatctgacttttaatcagagggtcagaggttcgaatcctctatggctcactttaagcactccttaatggggtgcttttttattacccatttttagtagtgatgtttatgaaaaaatttataagtatgactttcatagtatgacagttacacctttcattggtataattatgagtatgaaagttatagacggaggagagattatggatttttccaacttttttaataatcttagtactttgaagattattacaagtatattagatatacttattgtctggtatgtcctttatcttctcattactgtatttaaaggaactaaagcaattcaattgcttaaaggtatattatttatagttattggacaacaagtaagtaaacttcttaatttaacggctacctcaaagttatttgatattgtgattcaatggggcgttttagctttaattgtgatattccaaccagaaataagacgagcacttgagcaattagggcgaggaagcctatttaaacgctataccaatacttacagtcatgatgaagaaaaattaatccaatctgtatcaaaggctgttcagtatatggctaaaagacgaattggagcattaattgtttttgaaaaggaaactggattacaagactatattgaaactggtatatcaatgaattctgcaatatctcaagaattattgataaatgtttttatacctaatacaccattacatgatggggctatgattattcaaaatactaaaattgctagtgctgcatgttatttaccactttcagatagtaataaaatttctaaaagtttaggtacaagacatagggcagccgtaggaatttctgaagtttcggactcatttactgtggtagtatctgaagaaaccggttcaatatcagttactttcgatggtaaattaagacgtgatgtttctgatgaagtattcgaagagttattagctgaacattggtttggagctcgcgctcaaaagaagggtgtgaaatagcatgttagaaagtaaatggggattaagattttttgccttaatattagcgatctttttttatctttctgttaataatgtgtttggcaatatttttaacaatgataatctatctcagaattcttctaaaacaatagaagatgtacctgtagaaattctttataatacaaaaaatttacatgttactaaatcaccagatactgttgatgttactatttcaggaccacaatcaaagttattgaaaatagaaagttcagacgatatcaaggttacagttaatttatctaatgctaaatctggaaattataaagaagattatattgttaagggattaagtaacgatattagttataatgttaaacctaaacatgcgtatatcactttggaagataaagacactaaaactatgcatgttcagcctgatattgcacaaaacaatataaattcaaattataaagtaagtgaagcttttttaaataaaaatactgttcaagttacgggcggtaaaaagcaattagataaaattgcatatttaaaagcgacatttaaaaatgcgactaatatcagtgaggatactactgatgtagctgaaattactgcatttgacaagcaattgaataaattaaacgttcagatcaagcctaataatgttaaaatgtcagtgaaacttgaaccttacagtaaaaaagtaaaaattaaaactgttaaaaagggttcgttacctgacgatgaaagtttagataacattaaactaaatgagaatgaagtagaaatttatggtaataaagatgatttgaaggatattaatgacatagaagctgatgtaaatttagatgatatcactgagtcaactaataaaactcttgaactcaaaatacctaaacaggttaagaaatctgaattcaatgaagtcacagcacatgtcaatttaaaatagtaaactagataataaaggagtaattaaaatgggaaaatattttggaactgatggtgtaaggggagtagctaataaagaattaacacctgaattagcgtttaagctaggtcgctatggtggttatgtattagcacataatgaaggagagaaacatcctagagttttagttggtagagatactcgtgtgtcgggtgaaatgttagaatctgctttaattgctggattagcatcaataggtgcagaagtaatgagattaggagttatttctactccaggtgttgcatatttaacacgtgaaatgggagcacaattagggataatgatttctgcctctcataatcctgtggctgacaatggtattaagttctttggtgctgatggttttaaactttcagataagcaagaagaagaaattgaacaattattagaccaagaacaacctgacttaccacgtcctgcaggtaaagacattctgcatttttcagattattatgaaggtgcacaaaaatacttaagttatcttaaatctactattgatataaatttagatggacttaaaattacattagatggggcgaatggatcaacttcttcacttgcgcctttcttatttggtgatttagaggcaacaacagttacaattggttgtaatccagatggatacaatattaatgatgaatgtgggtctactcatcctgaacatttagctgaaaaagttgtagaaactgaaagtgattttggtttagcttttgatggagatggagatcgtttaattgctgttgatgaaaagggtaacatcattgatggtgaccaaattatgtttattattggtcaagacatgcataaaaatcatgaattaaataataatatgattgtatctactgtaatgagtaatttaggattttataaagctcttgaaacagaaggcattcaatcaaataaaacaaaagttggagatagatatgtcgttgaagaaatgagacgaggccattataatttaggcggagaacaatctggacatatagtaatgatggactataacacgactggtgatggactactaactggcgtacaacttgcagctattattaaatcaagtggtaaaactttaagtgagttagcagcccaaatgaaaaagtatccacaatcattaatcaatgtaaaagtaacagataaacatcatgtgtctgaaaatgaagacgttaaagctgttatggatgaagttgagaatgaaatgaacggtgaaggaagaatattagttagaccttcaggaactgaaccattagtaagagtaatggttgaggcagctacaaatgaagatgctgaacgttacgctcaaacaattgctaataaagtaaaagaaaaaatgggattaaattaatagtaccatttaaaaacaagaatacactctctttaaagttaaagctgtagaactgaaaactttaaagagagtattttttatcaaaaaatataaattaaatatcaaattatgactataagtttatgaattaaatataataatatttgcaaatgattaataaaaaaaggtaaaataaatagtattggaagaaaggaggatagatgtaataaaaataaaacaaagcgcctggacaagtaattagaatgttaatcatttagtattaattaggagaatactcatagacatactaattatattgtagacgaggagaatagttatcgatataatcggcggatgctattccggatgtggcacattcgttagcttattatttaaaacatataggtgactagatgtacaaatataataagaacgccaaatagaaaacatagaaatatgatgtttagaatccaatacaaaaaaacgaacaatgtctaattgaaaaattttatatagcagataaaattatcatatgactatgtaatggaggaaaaagaaatatgtgcggaattgttggatatattggctttgataatgccaaagaattattattatctggtttagaaaaattagaatatagaggatatgattcagcaggaattgctgttgtcaatgatgagggtactactgtatttaaggaaaaaggacgtattgcagaattaagaaaattagcagatagcaatgacattgatggtcacattggtattggtcatactcgttgggctactcatggggtacctagtactgttaattcacatcctcatcaatcaaataatggacgttttactttagtacataatggtgtcattgaaaattatgaagagctaaaaagcgaatacttatcagatgtaacgtttaaatcagaaactgatacagaagttatcgttcaattagtagaatatttttcaaataaagggttagaaactgaagatgcattcactaaagcagtatctttattagatggatcatatgctttaggcatgttagattctgaggatgaagacactatttatgtagctaaaaataaatcacctttacttgttggtattggtgacgactttaatgttattgcttcagatgcattagcaatgattaaagttacaaatcaatataaagaaattcatgatcatgaaattgttattgttaaaaaagaaagtgtaacaattaaagataaagatggaaatattcaagatcgtccaacgtatactgctcaaatagatgcatcagatgctgaaaaaggtatttatgatcactatatgttaaaagaaattaatgaacaaccagcagtaatgcgtcgtattattcaagaatacgaagatgaaaatggagatttaaatattgattctgagattattaaagatgtgtcgaatgcagatcgtatttatatcattgctgcagggacaagttatcatgctggtttagttggtaaagaatatcttgaaaaactatctagagtgccaactgaagttcatgtggcatcagaatttgtttataacatgccattattatctgaaaaacctttatttatttatatctctcaatcaggagaaacagctgatagccgtgcagtattggttgaaacaaataaattaggccataagtctttaacaattacaaatgtagcaggttcaacgttatctcgtgaagctgatcatacgttgttattacacgcaggacctgaaattgctgttgcatcaactaaagcttatacagctcaaattgctgtattatcaattctttctcaagttgtagctaaagcgcatggacgcgataacggtattgacttattaagagaattagcaaaagtaacaactgcaattgaaacgattgtagatgacgcaccagtaatggaaaaaattactaaagaattcttagaaacgactagaaatgctttctttattggtcgtgcgatggattacaatgtaagtttagaaggagcattaaaacttaaagaaatttcatatattcaagctgaaggatttgctggcggagagttaaaacacggtactattgctttaatcgaagatgatacgccagtcattgctttagctactcaagaaaatgtgaatttatcaattcgtggtaatgttaaagaagtagtagctcgtggcgctaaaccttgtattatttcaatggaaggtttagaaaaagatggagacacatatgtgattcctcatgtacacgaattattaacacctttagtatcagtagtagcactacaattaatcgcatattatgcagcgttacacagaggattagatgttgataaacctcgtaacttagccaaatcagttacagttgaataattcaaaaagctgggacatggatgacatgtctcagttttttatttaatttgttaaataatcagaatcatcatacacttattttaagtagaggtgatcatttgataaatttaaagcatatctataaacagaaacacggaaaaacaatccttaatgatttaaattggcatattgaaacgggagataattggattctttatggggtgaatggtgcaggaaaaacaacactattaaatatcatgaatgcttatgaaagtgtatctcagggtgaaatagaaatgtttgaaatggtaccaggtaaaaaaggatattctgcagaaaacgttcgtcaacatattggatttgtttcgcatagtttattagaaaaatttcaagacggtgagaaagtgattgatgtcgtattaagcggcatatttaaatctattggtctatataaagagtattctgatgaacatattaaagaagcagaaaaattattaaatttagtaggaatgttatcatataaagatcaatatttaggatatctctcaacaggacaaaaacaaatgtaatgattgctcgcgcgcttatacatcaacctgatgtgcttattcttgatgaaccagcatcaggattagactttttggctagagagcagttattatatttattagaaaatttaaataagacatacgctcatttgacgatgatttacgtgactcatgtcatagaggaaattattcctttatttagtaagatatttttattaaaagaggggagttgttttgataaaggaataacaaaagatattttaactgattcgattatgtctaaattttttaataatcaaattgaagtcattcaatatagaaatcgatatcatctttatataaaatataattgagtttgcactttggttaaataaatgtcacaatttttaggaaagaattagatggagggtatcacgatgatatttgaaaatattaaagcaatattcttagatatggatggaacactattgcatgaagataataaagcgactgtaaaaacaaaagaagtaattgatcaattaagagaaaaaaattataaggtatttctagcaacaggacgttcttattctgaaattcataatttagtaccaaaaggttttaaagtagatggtgttattagttctaatggaacaagaggtgatattgaagataaacttttatttaaacatagtttgacaatagatagtgtaaaaaaaaatcgtgcaactggctcaacaacaacatatttattatgaagtttttccttttgaaggagatagaatttcactaattgaagatcaatcatggatggaagatatgattgatagtgaacatccacaaaatgaagtgagtgaaagtgaatggaaatcacgtcgagatgccatgaatggtaaaattaattggagaaaagatattccaaatgacgcctattctaaaatttatcttttcaataaaaagttaaataaaattaaaacgtttagagatgaattaatacaaaataaagtgttattaaatattagcgtatctaattcttcaaggtttaatgctgagacgatggcttatcaagtggataaaggcactggaattaaagaaatgatagatcatttcgatattaaacaagaagaaacacttgttattggtgatagcgataatgacagagcaatgtttgaatttggaggatacactgtttcaatgaaaaatgcacgtccagaaattcagtctattactgatgatactacacaatatacaaatgaagaagatggcgcggctttatatttagaacaccatcttttaaattaaaataaggtaagaaagtaggagatacctgctttcttaccttttgtgttgaatagtgatttatttatcgttatttaaatttttttgatgacttaagtcttctttaacatgattttttgtatcattaaaagatgaaggatcgttttttaacgcttctttttcatgatttatttcttttttttcttttcgtttactttttttcttttcttttacaggtcttttcacattctcaccgcgacgtaagaaatattgaacaatacccattataattacaaaatatagaattaaacgtacaataataataagcgtttgagcaataattaaaatcacttgtgctacattttgggacatatttccggttaatacagttaatactgtaccaagtggttgtgtaatgataataatgagtaggttaattaataagatagctaaaaagaacttgaaccaagttttacatccatttttaattcctttaaagccatctttaaaatgacctatagcacttaagtcatttttacgtgcaaatgacacagtataattaatcattaatataaagaagaaccaatatacgattgaaagaatgaatcccataatgataattaagataatttgtacagtaagtaaaataccaatagcgtgatcggatgtacttactgactgttgaatagatgtgaataatggtgttaaagctttattaaataaaaagtttaatcctaatgtgattaaatataatacagcataaagaataatagtaattaaagctaaaagaagacttttaacatattttccttttttaaaagcaaaaaacaaatcagaaaattgaacagcttctttttcaatagctttagccataatattaaaagcccctgcaagtaattgataacctgcaagtataaaaaataataatcctaagaccaagacgagtattatcataactaatgacgcgcctgatgactgttgaaattgtgctgctagttgcatctgcataaagttttgaacgaagaaagttctagcaatcacaaatgccacaaatacaataataaaacttactaaactaaatagtattgtttttatgagttgtgacttagcatttttaaatgctaaactatgaaatttaaacaaaataagcactcctttacgttaatataatacacaatatcagaatttgtgctttttttaaattaatatctaacaatattatgttttaagtgttaaaatatgctaatgatttaataatgaaaggagactttatggtgaaatttgcaattttaaccgacgttcatggtaattttgatgccttacaaactgttttagatgatattgataatagagaagatatcgatcaaatctttaacttaggtgataatattggaattggccatgaaaccaataaagtattagatatgattttcgatcgagatgatatggaaattattgctggtaatcacgatgaagcaattatgtcaattgttaatggtacaccgtatccagaagatttaaaaaataaattttatgaacaccatcaatggattgaaagtcgaatggatgaagattactatgatgtattaaatacactaccaagatatttagaaaaaacaatttgtgggaaaaaatgtttatttatacattatgaaattgaaaatcaaagattagaagaggggattgataaacaaccatttgaacctattgtagataatcaaaaagaagagatagttaaattatttgaagataaggatgcggattttatagcttttggacataatcatcaattacacttgtatgatgataataacaaaacctatttcaatcctggttcagtaggacttaataatggtaaatatgccgtatatggaatcgtcacaattaacgaaaatgagtttagtgttgaaagagtaaaattaccgtatgataatgaagaatttcttcaaggatttgatgaaaaacatgtaccaggcaaacaatttattttcgattattttatataagtaaaaaaagtcgagcagaaactaatatgaattctgttcgactttttacttatattgtaaactgcggacattgtttgtgtagtcttaatgatgagcgtgctctttatgtaatccagagcatagtactgaagtatcgtgatcatgttgtgctgtttctaattgaattgtcatatgttgtatatttaagtgaagtaattcatgttctatttttttaagaagtccttcacagtcctgaacagacatagtttcagagacgactgcatgacaacttaacgcattcatatcatttgaaatagtccaaacgtgataatcatggacattataaatttcattatgatttataattgtactaatgattttatctaaattgacgtcacttggtgtaccttccattaaaatattaagtgacgaacgtgaaataccgattgcacttttcaatataataatggaaactagaatgcttgcgataggatcagcaattgtaaagttaaatacgtatataagaatagatgctataatggcacctaatgaaccaagtaagtctcctaaaacgtgaataaaagcaccgcgcatatttaagttatgtgacgtatcaccgcttttaaacatgattattgcaacgataatattcactataagtccaatcacactaataataaacatttcagtggattgcactttaataggattgaaaaaccttctaatcgcttcgatgataatgacgccactaataattaataaagttataccattaaataaggcagctaagacttcaaaacgcttgtaaccgaatgttttagttgaagtagcatttttctctgcataaataaatgcgattaaagcaactcctagtgaaacagtatcgctaaacatatgaagtccatctgataatagcgcaagactattagcgataaatcctcctaaaatttcaacaatcataaataagcctataataataaaagaaattgttaatacctttttgttattggtatggacatgattatgagtatggttatgatggtgtgtgtgattagacatttattattcacctctttgatgatgagcatgttgaatggcttgttttaataaagtagaaacatgttgatcgtctatagaataaatcatggattgtccatgacgtgacgatttaacgaggcctgcttgttttaaactctttaattgatgcgacacatttgattgagttaattttaatgtatgcgtaatatgcccaccactagcttcacctttatataacaattctaaaatacgtaaacggttataatcgcttaacgctttaaatgtctcagttaaacggttaagcatgtattcatctataaatatatctctatctttatttgtattggacatcacatgagacctcctctttaatatatgaatatatattcatatattaatatatagtgtccttttctaagtgtcaatgatatatagtaaataagtttaaaaatgatactaagtggtattaataaactatgaaatgaattgaaggaggaaataagtttatgagtatattagttattggtgctaatggtggcgtaggttctaaattggttaaccaattaaaagaagatcaagttgattttacagccggtgttcgtaaagaagaacaagaaagtgcgttaaaagatcaaggtgttaatgccattttaatagatgtagaaaaagatagtattgatgatttaactgagaaattcaaaggctttgataaagttattttctcagttggttcaggtggtagcacaggtgctgataaaacaatcattgttgatttagatggtgcagtgaaaacgattgaagcaagtaaaaaagcaaatgttaaacattatgtaatggtttctacttacgattcacgtcgtgaagcatttgatgcaagtggagatttaaaaccttatacaattgcaaaacactatgcagataatcatttaagaaattctggactaacttatacaatcgttcatccaggtggtttagaagataaatcaggtactggtgaaattaaagctgacttgtattttgatgaaggaagtacaattccacgcgaagatgtggcttctgtattaaaacacgtagcgacttctgaaaataaatttgaaaataaagaatttcaaattctttcagggcatcaatctattcaagaagcattatctcgttttgagtagttaagttagataattaattacaaatgaaaagttctgtgttagagtaggacagtgagttttaaaacttgctgttctattcttttttattaatatatataatttctattaaattaataatgaaattgatataataaacatatgagtgaaaatttttatttaactatagaagcgaaatagcatttatatagaattagttatctgatatattaaaagcttaaatagatagtaatttaaagataaaatgggtcatcaattgttctaattatacataatcatttaaatacgatatttcactttaaaataaagagagaagcaataaccgtgttttaggaggtgcaatcatgccattatttttaaagcctattttctttgaaaaaatatggggcggtaataagttaaatcaatttaattacgacataccaagtgaacaaactggagaatgctggggtatttctgcacatccgaatggaaaaaatatgattgaaaatggtcagtatgctggtcaaacattagatcaagtatggaatgagcatagagaattatttggagactttccaagtaaagatttccctttattatgtaaaatagtggatgcaagacaccctctatctattcacgttcatcctgacgactcgtatgcatatgaatttgaaaacggtcaatatggtaagtcagaatgttggtatattattgatgcagaagaagatgctgaaattatactcggtacctctgctgattcaaaagaaacatttgagaataagataaaagaagaggcggtgttggatgtagtagaaagactcaaagttaaaccaggtgagttttattttataccagctggaatgcttcattctataggttctggtgttttagtatatgaaacaatgcaatcatctgatatttcatatagagtatatgattatgaacgtaatcgaactgatggatcatcattagaagttaaaaaagcattagacgtgattcaatttactgcaaatgcacctgctatagtacctgaaactacaattgtagaaaatcataaacgtagccaaattgtatctaatgacttttttacaatggttaaatgggaaataagtggaacgcttaattatatgaagcctcgtgaattttgtcttatttctgtattagaaggtcatggacaagtgattacagatggagaaatctttaagctagaaaaggggtctaattttattttaacttctgaagatttagatagcgtatttgaaggcgagttcactctaattataagttatatttagttaatcaatttaatttataagcagaaatgttggaataatttctatatctagcatgattttctagtgtgatagctgaatctagaagttttttattttcctttttttgttaatcggaaatctaataaggtttaaataatgaggtagtatattttaatagtgaaatggaattttgtgatgattcatatgattctatttcacttttttgaatttaaaaagtgatttcataatacgtcaactctattaaaaaaatatgataaaataaaaaaaacgaaatcttatagactattcatatatttaagttaagctatctaaaaatgactaataggtgctaaaattaatattaatatatacatgaataaagatgctaaatttaaaataagtaagaaggagattctagatggcagaagaagtaaattacttttggttaaattgtggatatacaagatggaaccataatgaaccattagttggacaaataactttatttgagtctggagcacagttcaatcctactcagggttttcgagcgttcaaaaaagctaaaattggcgatcaagtgattttttatcaagtacaaacagatactggattattaggaattggggaaattattagtgttcaaacaggagcacaaaataaaattagagttgaatttaaatttaatgaagaattaaagcctttaactactgactatttaaaacgtagtgaagtgctagattatcgaatgaataatatgcgagaaacgttaataaatcagctcacaaaagaggagtttcaattaatcgttgagttaggaaaaggtaacattcaattacctcgatatttcttcttatctgaaactgaaaaatttgaacctgatacacattatacgatttttacacatacttataatggaattaaacggaatggttatcatttttataaccaattagaagtaggggataatttaatattttatgataagaatagtaatcaatcggtcgtaggaattggtgaagtatctcgtcatattcatgaaaaacctccaattcctggtcgtactaatagtactgcaatagagatttattatgaaaagaatatcactcctgttacattaggcgcactaaataaacatcctaaattaaaaaacttatactttttacaagaaaatgctaagcaagcaatagcaagtatgagtcaagcacaatacgatgctattatagaaatgagtgaaaatgatgggattagaacaccatttgagactattaaaaaaccaggattcaatacagatcatgatgagacaattaaaccttttattttacttgttgtagataaacgtgaagaaggtttgaaagcagccaataatcttttacaaaaaacgaatgctaatccagttattactagtggtcaccctgactttagtgaagatatgttatatggcagatatctacctaatgagacaggtgccttatattatagagaaggttttattacacaacttatgcctaaaaatgacaaaagttacttagtaattgataactttaatagacttgatccagatatatttcaaacttatattaatgttttagaagggtacgaagttacattacctagatataataaagacggtaacatgattacttggtctcgtgaaaaagattctttttatcattttaatcctaattggcatattattggggtaacatacgaaaagttagaagatataaaaaataaatattcacaacaatttttaaaatatacacgtattgtaaaagtgaaccatgatgcataatagcagacaagttagataaaaaacatcataacgtataatgagctaaagtggatatagaatttgaaataaattctatatccacttttttatgtttaatgagtccttgtaaaaggaataaattaaataagttaaaaaggaaggtgacggaacatgccaatcgtttattacgatggaaactgtgtgtattgctataattattgtatttggctaatacaacatggtttacctaaaaactatgagtttgcgactttaaaaggaaaagcgggacaacatttatttgaacaacatcctgaagctaaaaataaaaatagtgtgatactacaagaaggagatcatttatattacgagactactgcagtagcaaaattaatcacaacattaagtagtgaaaaatggttaggtatactacttagagtaacgccattaccaataagaaacttaggttatcgactatttgctaataatagagataaaatgtggaaaacacattggcataaacccaacgcatatgaaaaatcattctttattgatgatgatagacaataaatgagaaaactattttttaattgataatatatataagttttaattatatattataaagcttttgataatgattctatatatttattcatgagtattagtgttttcaaattacgtgtgtaaaataactttacagattataattattataatataattatgattgtaaaagagagacatgattgtataaaaaaggagagattcgatgacgcaacaagatgtagtaaaagaattaaatcaacaagtggcaaactggacagtagcatatacaaaattacacaacttccattggtatgttaaaggtcctaatttcttctcattacatgaaaaatttgaagaattatacaatgaagctagtcaatatgtagacgatttagcagaacgtattctagcaattggaggtaatccagtagcaacattaaaagaaagtttagaactttcaattgtaaaagaagcagatacacattacactgctgaagaaatggttaaagctttctctgaagatttaactcaaatttctaaacaacttggaaaagcaattgaagttgcaggtgaagcaggagacgacgtttcagaagatatgtttattggtatgcaaacatcagtagataaacataattggatgtttaaatcttatttagtttaagtattctattttaaaaagagccattgtggacgataaaacgtctacaatggctcttttaacttttaatattaacattgataagtgattattcagcgatttctaaagcaatttccatcatttgagtaaatgatgtttgacgttcttcagctgatgtagcttcatctcttaagatatgatcacttacagtaaaaatacctaaagcttttttaccagcatgaatcgcatttaaatataagccagctgattccatttcaatacctaagatacccatgttcttccaactatcattgaaatgtttatcggcattataaaacgtatctgatgataaaatatttccaacatgtgtaactgccccgatatcatcagcaacttgtttagctttagtaattaactcaaaatctgcaattggagcaaagtgaccaggaatattaaattgatctacataatttgaattagttgaagcagcttgagcaataatgacatcatataaattcacattctcttgtaatgcaccacatgaacctattcgaataattgtatcaacatcaaagaaattataaagctcatacgaataaattccaatacttggaatacccatacctgaacccattactgagatctctttacctttataagtgccagtgtatccaaacatattacgtacttcattaaattgttcaacattttctaaaaagttatcagcaatatattttgcacgtaatggatctccaggcattaatactgttttagcaattttagctccattaggttgaatatgaggtgtaccgtttgtcatgaatatcttctccttaacattttattcaaaataaagataacatttgtttaaaatttttgcgaatttttgtactatataaatgagagaaacatataaattatgttagtataagttggctttcgagcaatacattggaggaaatttttatggaatattcaaaatatattgatcatacacttttaaaaccagaatcaacacgtcaacagattgataaaattatttctgaagctaaggcgtatcattttaaatcgatttgcgtcaatccgaccgacgttaagtatgcttctgaacaacttgtgaattctgatgtactcgtatgtacagtgattgggttcccacttggagctacaacaaccgctacaaagatttttgaaacagaagatgcgattaaaaatggcgcgtctgaaattgatatggttatcaatataggcgcacttaaagatggaagatatgaagatgttcaaaaagatattgaaggcgtagttggcgcagctaacggaaaaatagtgaaagttattattgaaactattcttttaacagacgatgaaaaagtgaaagcaagtgaactagcaaaagctgctggtgcagatttcgttaaaacatcaactggctttgctgggggaggcgctacaccagaagatgtgaaattaatgaaagacactgtgggagacgaattagaggttaaagcttcaggtggcgtgcgtaatcttgaagattttcacaaaatgcttaatgcaggtgctacacgtattggagcaagtgctggtgttcaaattatcaaaggtttagaatcaaattctgattattaatagtatgttttttaacatcatttagaaatgcaacaaccgagaaaggggatagcacaatgagaatggtagacatcattgaaaaaaagcgtgatggacagatattaactaaagaagaaatcgaatttttcatagaaggatataccaatggagataccccagattatcaagcttctagtttagcgatggcaatctttttccaagatatgaatgaagaagaacgtgcagctttaactatggcaatggttaattcaggtgatgttattgatttatcaaaaatcaatggtattaaagtagataaacactcaactggtggcgttggagatacgacgacattagtgttggcaccattagtagctgcagtggaagtgccagttgccaaaatgagtggccgtggtttaggacatacgggtggtacgattgataaattagaatctattgatgggttccatgttgaaatctctgaagcggacttcattaaacttgttaatgaaaatcaagttgcagtgattggacaaactggcaatttaacacctgcagataagaaactatacgcattaagagatgttacaggaacagttaactctattcctctaatcgcatcatctatcatgagtaagaaaattgccgcgggtgctgatgcaatcgtcctagatgttaaaactggaaatggtgcattcatgaaaacattagaagacgccgaggctttagcacatgctatggttagcataggaaataatgttgggagaaatacaatggctattatttcagatatgagccaaccacttggtcgtgcgattgggaatgctttagaattaaaagaagcgattgataccttaaatggtcagggacctgaagatttaactgaactagtgttaacgcttggttcacaaatggtcgtacttgctgaaagagcaaatacacttgaagaggcgcgtcaattgctcaatgaagccatcgaaaatggttcagcattagataaattcaaaacatttttagaaaatcaaggtggagatgcttcagttgtcaatttaccggagttattaccgactgccgaatatcaaattgattataaagcaaaatcaagtggtgtagtttcagagcttattgctaatgaaattggagttgcttcaatgatgttaggtgcgggaagacaaacgaaagacgatgacatagatttaagtgttggcattgtgttgaataagaaagtaggagacaaagtcaatgtaggagagtctttattaacgattcacagtaatcgtgaaaatgttgatgatgtaattaagaaacttgacgaaagtatcgaaattaaagcgcaagcaaaaacaccaacattaattcataaaataattacagagtaggagtgttaaatatgacgacaccatttaaaagagtgcatttaattgtcatggattcagtaggtattggtgaagcacctgatgctgcagcttttaatgatgaaggttcacacacattaaaacacacgttagaaggttttaaccaatcattacctaatttagaaaaattaggattaggtaatattgaagatttgccagtggtcaataaagttgaacaaccaggtgctttttttactaaattaagtgaagcttctgttggaaaagatacgatgacaggacattgggaaattatgggactaaatatcatgcaaccatttaaagtttatccaaatggatttcctgatgaattaattcaagagattgaagaaatgacaggtcgaaaagttgtagcaaataaacctgcttcaggtactgcaattattgatgaattaggcgaacatcaaatgaagacaggagatttaattgtttatactagtgcagacccagtacttcaaattgctgcacatgaagatattatcccacttgaagaattgtatgatatttgcgaaaaggttcgtgaattaactaaagatcctaagtacttaattggccgtgttattgcacgcccatatgtaggtgaaccaggaaactttacacgcacgtctaatcgtcatgattatgcacttaaaccatttggtaaaacagtaatgaacacattaaaagatcatgactatgatgttattgcaattggtaaaattaatgacatttatgacggtgaaggtgtaacagaagcaataagaactaaaaataatatggatggcatggatcagctcattaatgtcgttaaaaaggactttaatggtatcagcttcttgaatttagtggattttgatgcgttatatggtcaccgcagagacaaagacggttatgcacaagccattaaagattttgacgaacgcttaccagaattaattgatcatttacaagaagatgatttagttattattacggcagatcatggtaatgatccaattgcagagggtactgaccatacgcgagaatatattccagtgcttatgtttagccctaaaatagatgcataccatgaattatcaggagatacaacatttagttctattggtgcaacaatagcagataatttcaatgttgaattgccaaaatacggaaaaagttatttaaaagaaatgggagttgaataattatgaaaataatgagatatttactaggtttagcatttggatcagcaggaatactacattttacaaatgaacgtcaatttagatcgattgtaccggagtatttaccattacgaaaaacagcagttttagtgacaggcgtatttgaaatgttctttggagttatgttattagccaaaagacctgcggattggttgaaaaaaggtattaatgcatttttacttgcagttttaccagcaaacatttacatggcaagaaagcaattaccattaggaaataaatctgttcctaagtgggcattatacttaagattaccacttcaattcattttaatagctatcgtaaaaaaattataataaaatttaaataaaccataccctacctaaagcatttaggtagggtatggtttatttaattattaattatttgccttcaccaaaaacgtcgttccattgattacgtttatctaagaattcttttgcgagtgctttagcaccttcaagagaatgactagcagcccaaccgcattgaacttcattgcaagcaggaacttctgtagcttctaacacatcatttaaagttttttcaacaatatttaatacatcttcgtagtcatcgtgatcaataaatgaaacataaaaaccagtttgacaacccataggacttaaatctacaactttatcagaatgatttctgatatgttcagccattaaatgttctaatgaatgtagcgctggcatatccatatgcgctttatttggttgtttaaaacgtaaatcatattttttgataacgtctccattaatcccttccattgtgcctgctaagcgaatatatggagcaactacttttgtatggtcaagattaaaactttcaacgttcattttagtcatttttatttcctcctataaatacattgcttgaataatatgattgtaacaagagtgccaatcatttacaattttcttaattaagtgatttaaatacttattgtaagaaaattttgtaaattcaaacgaatttaatgacaatctatagtaaatccgataaaataagtaataattaaatttaatgatacatcaagaaattgattgacttgatgtctaaataaatatagatattaatattcgtgtataaaaggagtatagattgatgagtagtaaacaagagatattagactatatagagaataaaaagtacgattatgtcgaaataagtcatcgtatacacgagcgtcctgagttaggcaatgaagagatatttgcttcaagaacattaattgatcaattaagagcaaatgagtttgagatagaaacagatattgccggacatgctactggttttattgcaacttaccagtctgaaaaagaaggaccaactataggatatttagctgaatatgacgctttacctggtttaggtcacgcgtgtggtcacaatatcattgggacagcaagtgtattagcaggagtcgcacttaaacaagtcatcgaccatattggtggaaaagtagttgtattaggatgtcctgccgaagaaggtggagaaaatggaagtgcgaaagcttcatatgtaaaagccggtgtgattgatgatattgacattgcacttatgattcatcctggaaatgaaacatatccaacgataaatacattagccgttgatgtgcttgatattaaattttatggtaaaagcgcccacgcttcagaaaatgcggatgaggctttaaatgcattagatgcgatgatttcttatttcaatggtgtagctcaattacgtcaacagattaagaaaagtcatcgtgtacacggtgtgattttagatggaggtaaagctgctaatattatacctgattatacgcatgcaagattttatacacgtgccactactagaaaagaacttgatattttaacagaacgtgttaatcaaattgcaaggggtgcagccatccaaacgggttgtgactatgaatttggtcctattcaaaatggtgtaaatgaatttataaaaacacctaaactagatgaattatttgaaaaatacgccatagaagttggcgaagaagtaagttatgatgattttggttttggttcgacagatacaggaaatgttagtcatatagttcctacgattcatccacatgttaaaattggctcaagaaatttagtaggtcatacacaccgttttagagaagcagctgcaagtgttcatggcgatcaagctttgattcgaggcgcaaaaattattgctcttatgggactagaattaattgaaaataaaaaactatttgatgaggttgtagagcaacattctcaaataaaggggtaaataaatgaaaaatgaatatagtgttccaaagttaacgttaagtgatttgtatgatgaaaatattgtatataattcaagaccttcttatgcattgaatccttggctcacaacagaagaacatcagtctaattttttgactggtcgtgaaatgattatcgctaaggatatgccgattgttgtacacgaagcgagtattacagataagttacaacaactatttgatcttattggtaaaaaaataccggagcatctttatacatttagaaatcgtgaaacgtatgaacgcttgttacaagagattatcaataaagaagggaaaaaaatatattttcaatatatcgaaaacaatgacatagtagatgacgaagcgtatgccattgataaagacgtttttgtagctttaaataataaatcacgtattcctgaatggacaaatcataaatatttaccggatcgtgaaattgtgtcaattagagacttcaaaggtcgtatcaaagattgggattatccttttgtaattaagccaggagatgaattaccaactgcaggtggctatggcgtaatgatttgctataacgacgaagacttagaaaaagcaactaaacgaatatttgaagcggcccatgccaccgataatttaatcattgaacaaaaaatagaagcagttaaaaattattgtgtccaatttgcatattctaaagaaataggtattacctatctaggtactgcccatcaaattaccgataaatatggtctatacgcaggaaatgaaaatgtgcatgatgttccagaaaaagtgattcaagctggtcgtgaaattatgaaaaatggagtgaacttaggctttattggtgtggcaggatttgatttattattagatgaaaatgataatgtatttgctatagatttgaattttagacaaaatggttcgacaagcatgttactattgcaagatgaattaaatcctaactatcaaaaattttatagttatttttcaagaggagataatactcgttttttcaatgttattttaaaatatgttaaacaaggcgtgctttatcctctttcgtattatgacggtgattggtttggtaaagatgaagtgaaatctcgctttggatgtatatggaatgctgattctaaagaagaagttgaacaattagaacaagcatttattagtgaacttgatgatactaattaagttagagtataggttaaattaactataaaaaagaatatagatgtttgacgttaattttaatataatttaacatttaattagtatattaagagagagggtttgcaatggaatataagcataatgactatttcaaagagatattaattaatgaagtcattattttggctagtaaaaataaaaaattaactcgtattcatcatgaagatggtgattatacagggatgtggacgaatgaagacatcgcaaaagagtatttaaatcactcagacattcaatttgatcgactattaaatattgatattgatacgttcgttacgtatgatatggatgaattgtttgatgaaagtgataaaattttaatcaatacttcaattaaagaagagggacatattgtcaaagttgtagacatgatggatgaactcatgtctgaattagacaaaattcgtcttaaagaatttgcaaaagatatttcaaaagaaaatcatgtttttggtttaacacgtaaaggggaaaaaagatttattcttattagtgataaagaaaatcaaaaacctaatattatgcctgtatggagtattaaaaatcgggcacgaaaagttcgtgataaagattttgaagaatgtgatttaatcgaaatcgaaggtagtgtatttagtgaatggcttgataaattaagagataatgatcaagctgttgcagtagacttaaaacctggagtcgtaggtaccattgtttctccacaaaaagtatctaatgaattatcattttaaatcaaatcccaataggtttcttttttaagaaatctattgggatttttatgttaatatttttggtttgaattagcttaaatgaaggacaccgattgcacctgaaaatgcaccattttcaatgtaaaaaggatggcatcctcgtaagacagtataatcctcaataacttttcgtagtaagggattattattaaaagaagacccaatataaacaacattttttgtttggtattcacgagctactgtaatcgccatcgttgtaatcacttctccaacgacacctactacagatgctaatttatctgagttagtaacatgttcattcatattatttagtacattgccaaagtttgcagcagtgagttcaccaggaataggcggttcagaatctttatatatatgtttaacttttaaatcgataatatctctatttccaaattgagcgagatctgtaagtgtttcataatcagatatttcagtcaataaataacctaaacctcgaatcattccgccaccagtaccaattccacctacacgttcttgatggtgaccgttataataatgtaaagatgtaccagtacctatatttgcaaatatgtattgattaatatgatggccttgctccttaagtaaaatacctaatccccttgaagcagcatcaaactcaacaaatatttgggatgattgtttgatgttttcagcaataacgcctgcgttaccccctgttaaattgattttttcgaattcattttggtttaaccattgaatgactttatttatatctgttgttaattcagttgacaatgtacggtgtgtatcatcttccattgctattttaattaatgtaccgccggcatcgatacctactctcatttttttcacctctaaaattaatatatgacaagttaatactataataattttgacgaattgcaattattttacaatattataaaataaatggtaaatattagagtaaatagatcattttataagatttaaaggttatatatgatattattaaaacaactttgtgatataggggctaattttatgagtatagtaaagcaatttgaaaacattacaattcaagaatttgaagaacaatatcgcgatgatgtcttaaattttgaattaagtgaacgacaacaaatttattcatcattacctaaatctgtattagaagatgctttaaatgatgaaaatcgagtagctaatattgccattaatgaaaatggagatgtagtaggattcttcgtacttcatcaatattatcaacatgaaggatatgatacacctgagcatgtcgtttatgttcgatcattgtctattaatgaaaagtttcaaggacaaggctatggtacaactatgatgatgtatttacctcaatatgttcaagcattgtttccagatttcaatcatttatatttagttgttgatactgaaaatgaaggggcctggaatgtatatgaacgtgctggattcatgcatacagctactaaagaagaaggacccatcggtaaagaacgtttatactatttagatttggattctaaacatgtatcgtcattgaaattagttgagaataaagattcaaatattgccatgtatcaaattattgatttattaaaagatgatcaaaaagttggatttattgcactcgaacatctagatacccatctaaaaatcgccgcaatagaagtatataaagatcaaagaaaagaggggattgctgggagtgctttaagacaactccctacatatgtacgcaaacattttaaagaaataagaagtataggtattacattatttggagaaaataatgaacttaagccattatgtattagtagcggctttgttgagacagatcaatcagatgacttagttattttcaaaaaatatattaattactaattgaatagcaattgcgaaatcataaaatgtcatttataatttatctttgttactattaataaaagcaatataaagataataaaatcctttgaaaggaagtttagttataatgaaaattcaagattatactaaagaaatggttgatgaaaaatcatttatcgatatggcttatactttattacatgataaagggtcaacaatgaatctctacgatattattgatgaatttaaaagccttggtaattatgaatatgatgaaattgaaaaccgtattgtacaattttatactgatttaaatacagatggacgtttcttaaacgttggtgaaaatcaatggggattacgtgattggtattcagtagatgatattgaagaaaaaattgcaccaacaattcaaaaatttgatattcttgatgacgatgatgaagaagatgaaaatcttaagttacttggcgacgatgaaatggatgatgacgatgatattccagctcaaacggatgatcaagaaacattagatgattctgatgataatgaagaagatattgacggttcagatatcgttattgaagaagatgatgatgacgacatcgctgaaggtgaagaagaagcatttgaagatgcagaagattttaatgactaaatattagttttaattgacttttgaatgaaaaatgttaaaattttattcgggctcctttaattaggacacgtgtataaatgttatacgctccccttacaaatatgtgagagggagcgatttttttatttttaggaaatgtttaaattttgtagagatagagtaaggaagcaacccttaataaattaggaggtcagacaatgacaaaatttatctttgtaaccggcggagtagtttcatctttaggtaaaggtatcacagccgcttctctaggaagattgttaaaagacagaggacttaaagtaacaattcaaaaatttgatccatatttaaatgttgatcctggtacaatgagtccttatcaacatggagaggtatttgttacagatgatggcgctgaaactgacttggacttaggacattatgaacgttttatagatatcaatttaaataaatattctaatgtcactgcgggaaaagtatattcacatgtgctaaaaaaagaacgtcgtggagattatttaggtggaacagttcaagtgattccacacattacaaatgaaattaaagaacgcttattattagctggagaaagtacaaatgcggatgtagtcattaccgaaatcggcggcacaacaggtgatattgaatctcttccatttattgaagctattcgccaaattagaagtgaccttggtcgtgagaatgttatgtatgttcattgtacattacttccatacattaaagcagctggagaaatgaaaactaaaccaacacaacatagtgtaaaagaattacgtggtttaggtattcaacctgacttaattgttgttcgaacagaatatgaaatgactcaagatttaaaagataaaattgctttattctgtgatatagataaagagagtgttattgaatgtagagatgcatcgtcattatatgaaatcccattacaattaagtgctcaaaatatggacgatattgtaattaaacgattagatttagatgctaaatacgatacacaattagataaatggcaatatttattagataccgttaattcattagatggtacaattactattggcttagttggtaaatatgtaagtttacaagatgcatacttgtcagtggttgaatcactaaaacatgcaggttatccattgaaaaaagatgttgtagtaaaatggattgattcaagtgaagtaacagacgaaaatgtagagagttacttaagtgatgtggatggaattttagttcctggtggctttggttttagagcaagtgaaggtaaaatttcagctatcaaatatgcaagagaaaataatataccttattttggcatttgcttagggatgcaattagcaactgtcgaatttgcaagaaatgttgtaggccttaaagatgcccattcagcagaacttgatccaaatacaccatatccaattattgatttgttacctgaacaaaaagatatcgaagatttaggtggcacattacgtttaggtctttatccatgtactattaaagatcatactttggcgcatgatatttataatgaaacaaatattgaagagcgtcatcgtcatcgttatgaatttaataatacttatagagaacaattagaagataaaggaatggtcttttctggtactagtccagatggtcgtttagtggaaatggtagaaattccagaaaatgatttcttcattgcttgtcaattccatccggaattcttatctagacctaatagaccacaacccattttcaaagcttttgtagaagctgcttataaacaccaacaaaattaaaatatcaaaatagaagcggaacagactactttttaaagtctattccgcttcatttatatcaatttatatagaagttaaaggctgtacatgttaagtattaatgattataaagttattttataattccaagtctctagtcatttcaatcatctgtgtatatatatcatagtaaatgtaattaaacgccattgtatgaggttgtacaattttatcataatcctcagtatatacgattggacgcggggttgataagtttacaaaatgcataagatgttcagggaaatcttcttgtttaggacgattgcatactaatacaaaatcaatatctttgtctattaattgttgaacatcttgagcaacttccttggtataaaaaggagagaataaaaatacacggtcagttgtgtctaagtcatttaaactgtttaattcactcaattttttactagaatttaatttttcatcactgtctaatataaaagtttcaaagaattttaagtctccataaccattaatatatacatacccttctccaccaatagcttggattaaacattgagcagccatttgtatatctaacgcctggtcttctaaacgattgaatacacccgttaattgtgtttgtagtatctttgacatgattatcctccatttcattagtattgtaatgaaatatgatattttatgcaatgaagcttcaaaagttatcacttatttttaaattaagcatgcaataaaaaatattatctgctataataatttttgaaaatttatgtaattggatacaaggaggaactttcatgccattagtttcaatgaaggaaatgttaatcgatgcgaaagaaaatggttatgcggttggtcaatacaacttaaataacttagaatttacacaagctattttagaagcttctcaagaagagaacgcgccagttatcttaggtgtttccgaaggtgctgcacgttacatgagtggtttttatacagtagttaaaatggtagaaggtttaatgcatgatttaaatattactataccagtagctatccacctagatcatggttcaagttttgaaaagtgtaaagaagctattgatgcttcacatagcccatttgaagaaaatattgaaattacttctaaagtagtagaatatgcacatcaacatggcgtgtcagttgaagctgaattaggaacagtgggtggacaagaagatgatgttgtaggcggtatcatctatgctgatcctaaagaatgtcaagaattagttgaaagaactggtattgatactttagcaccagcattaggttcagtacacggtccttataaaggcgaacctaaattaggcttcaaagaaatggaagaaattggtgcatcaactggcttaccacttgttttacatggtggtacaggtattccaactaaagatattcaaaaagcaatcccttatggtactgcaaaaattaatgtaaatactgaaaatcaaattgcttcagctaaagctgttagagatgtattgaacaatgataaagaagtttacgatcctcgtaaatacttaggtccagcacgtgaagctattaaagaaacagtaaaaggcaagattagagagtttggtacgtctaatcgtgctaaataaaataaagattattaaaggttaaggcaaccttaactgtcagcaaagtgatcgctttgttgacagtttttttattttatacaaaattttacgatatattattaaagtatttgtataaagttagtcgtgcggagtgttactcaatgactgactcacgatgtataaaaattaaattaactttttataaaatttatgaaaaaacagaattaattaattgtataaattgatttataatagtgttatcaatccgttatatgaattattagatttttagatattaatattaatattataattgctaaatttttttaaaagttagtgttttacaaataaataatatataatttataatgcgaattatgtataattttacaaaaggcgataaaggagaaaaaataaatgagtcaagaagtaattaaaatccgaggtggtcaaccactaaagggtgaagttacaattagtggtgcaaaaaatagtgccgtagctattattccagctactttattagcgcaaggacaagtgaaaattgacggtttaccgcaaatctcagatgttgaaacacttgtgagtttattagaagatttaaatattaaaacaaatcttaatggtaaaacattagaagttgatacatcagaaattaaaaatgcaccattaccaaataataaagttgaatctttacgtgcctcttattatatgatgggagccatgttaggtcgatttaaaaaatgtgtgattggtttaccaggtggttgtccattaggcccacgtccaattgatcaacacattaaaggatttaaagctttaggtgctgaaattgatgaatcaagtgatacatcaatgaaaatagaagcaaaagaattgcacggagccaacatctttttagatatggtaagtgttggtgcaaccatcaatattatgcttgcagctgttcatgcaaaagggcaaacaacgattgaaaatgctgccaaagaaccagaagtagtagatgtagcaaactttttaaatagcttaggcgcaaatatcaaaggcgccggtacgagtactctaaaaatcagtggtgttgaagagttacatggagccgaatatcaagtgattcctgatagaattgaagcaggaacgtatatgtgtattgcagctgcttgtggtgaagaagtaacaattaaaaatattgtacctaaacatttagaagccctcacagttaaactaaatgaattaggcgttgatattgatatcgatgatgataaagaacaaatagtaattaaaggtaaatcatcatataaaaatgtagatattaaaacattagtatatcctggatttgctactgacttacaacaacctattacgcctttattatttatgacagatggtccttctttcgttacagaaacgatatatccagctcgtttccgccatgtagaagagctcaaaaatatgggagctagtattgaagcagatacgtctactggtactgcaacaattaaaccttctaaacttcaaggtgccgaagtatatgcgagtgatttacgtgcaggagcttgtttgattattgctggattactagcagaaggtgttacaacaatttataatgttaaacatatttatagaggatatacagatatcgttaaacatcttaaagaattaggtgcggatatttggactgaacaagtttaattatttttgatatacttaaatatattaattgctgaagtatattaaatacctgcaatgtttaagaagttttgaatagaggtgaagacaatggaaatctgtccatatctcgaagaaacctttaaaattgttggtagaagttggaacggtttaatcattaattacctatctcgatgcgctgattatactgcacacttttccgatatgaaaagggatttaaaaacaattactccacgtgcattaagtattaagcttacagaattaggtgagtggggattagtagacaaaaaagtcatttctacacgtcctgtttctatcgtttatgagttaaccgataaaggaaaagcacttgctgaggctttaagaccaattgaagcatgggctagagattacgtcacattagaacataacgattcagttaaataatatagttaaaaggttggagtttatataaactttaaccttttaattatgtttaaataacatcaaatcggatatatattagacatacacattcttaaggagtgaatcattgatgagaaattatactcaacaatatattaatggtgaatggattgatagtgaaagtaacgaaacaattgatgtaattaatccagcaacagaagaagttattggaaaagttgcaaaaggtaatgaaaaagacgtagaaaaagcggttcaagctgctcatgacgtatatttagaatttcgccatagttcagttgaagaaagaaaacaactactagatagaatagtagaagaatataaaaatagaaaacaagatattattgaagcaattacagcagagttaggcgctccactaactgtttcagaaaatgttcattatcaaatgggtttacaacacttttcagaagcacgtagagctttagattcatttgaatttgaagaacgtcgcggagatgatttggtaactaaagaagcgattggcgtttctggattagttacaccatggaatttcccaactaatcaaacatctcttaaattagcagcagcatttgctgcaggtagtccagttgtgttaaaaccttctgaagaaacaccatttgctgcaataattttagctgaaatctttgaaaaagcaggcgttcctaaaggcgcatttaacttagttaatggtgatggtgaaggtgtaggtaatccattaagcgaacatcctaaagttagaatgatgtcattcactggttctggagctacaggttctaaaattatggaaaaagcagctaaagatatcaaaaaagtatctcttgaattaggtggcaaatcaccatatatcgtacttgacgatgtagatattaaagaagctgcaaaagctacaactggaaaggttgttaataatactggtcaagtatgtactgcaggaacaagaatcttagttccagaaagtattaaacaagaattcttaactgccttaaaagaagagtttagtaatgttaaagttggcgatccacttgataaaaatacccaagtaggaccaatcattagtaaaaaacaattcgacacagtacaatcttatattgataaaggtattgaagaaggcgctgaattattatatggtggtccaggtaaaccagaaggattagatacaggttattttgctagaccaactatttttataaatgttaaaaatgatatgactattgcacaagaagaaatttttggtccagttgtttcagtaatcacatataatgatttagacgaagcaatcgaaattgctaatgatactaaatatggtttagcaggatatgtaattggtaaagataaagaaacgcttcaaaaagtggcacgttcaattgaggcaggtagaattcaaattaatgaatctccaaacgaaccctatttaccatttggtggttataaacaatctggtatcggtcgtgaatggggcgactacggaattgaagagttcttagaagtaaaatcaattgctggttattttaaataattaagtataatgaaatagtttaatataaatacagttcatggaatcattttagttccatgagctgttttattttttgaaatttaataaaatcattttgtaattaaattaaaaatttgctatattaattctagtatttaagatgctaacgtttaaaacatttaagttataatcatttagatgatttaacaatgctagtagctagatgatttttataaaaatataagaaatgggtgcaatttatgcctgaaagagaacgaacatcaccacaatatgaatcttttcatgaattgtataaaaattatacgacaaaagaacttacgcaaaaagcaaaatcattaaaactaactaattatagtaaattgaataaaagtgagcttgtcttggcaattatggaagctcaaatggaaaaagatggaaattactatatggagggtgttttagatgatatacaacctgatggatatggttttttaagaaccgttaattattctaaaggtgaaaaagatatatatatatcagctagtcaaattagacgttttgaaattaaacgaggcgataaagtaactggaaaagtacgaaagcctaaagacaatgaaaaatactatggacttctacaagttgactttgttaatgatgaaaatgcagaagttgtaaaaaaacgtcctcatttccaagcacttactccgttatatccagaggaaagaattattcttgaaacagagcctcgaaattattctactcgaattatggatttagttactccaattggtttaggtcaacgtggtcttattgtcgctcctcctaaagctggtaaaacttcattacttaaagaaattgcaaatgcaattagtacaaataaaccagatgctaaattatttatattattagtaggtgaacgacctgaagaggtaactgatatagagcgttcagtagagtcagcagaagtagtacattccacttttgatgaacctcctcaacatcacgttaaggtagcagaattattattagaaagagcaaaacgtcttgtagagataggacaagatgtcattatcttgatggactctattacgcgtttagcaagagcatataaccttgttatcccacctagtggtagaacattgtcaggtggcttggatccagcatccttacataagcctaaagcatttttcggtgctgctcgtaatattgaagcaggtggtagcctaactattttagcaacggctctagtagatacaggttcacgtatggatgatatgatttatgaagagttcaaaggtacaggtaatatggaacttcatcttgatcgtaaattatctgaacgtcgaatattcccagctattgatattgggcgtagttctacgcgtaaagaagaattattaattagtaagtctgaattagagtcattatggcaacttagaaatatgtttactgattctaccgattttacagagcgttttataagaaaattaaaacgttcagaaaataacaaagaattttttgaacaattgcaaaaggcagccgctgaaagtacaaaaacaggaaaaccaattatctaaaatatgtgattgagggttgcgttttccttcaataactattataattacacagtattgggtaaaaactcacaaataactctgttccagatggttcagggcaaaggagctgaaaaaaatgaaacaaggaattcatcctgattaccacaaagtcatctttttagatacaacaacgaactttaaatttttaagtggttctactaaaacttcttcagaaacaatggaatgggaagatggtaacgaatacccagttattcgcttagatgtatcatctgattcacatccattctacacaggacgtcaaaaattcgctgctgcggatggtcgtgtggaacgtttcaacaaaaagtttggtctcaaatcaaacaacaattaattttgaacttaaaatgcctgcctaatctattatgtatagaattaagcaggtatttttttatttctaaactattttattaatttcttcagtgataacccagtaataaactcatttataataatcgaaaatatgatataattaagcgattatgttttgaaaaaggtggaacttataatgtatgagacttaccattctggttggattgaatgcattactggaagtatgtttagtggtaaatcggaagaattaattcgtcgattaagaagaggaatttatgctaaacaaaaagtaatcgtatttaaaccagctattgatgaccggtatcataaagagaaagttgtatcacatgatggtaatgagctagaagccattaatatctcaacagctagagaaatactattacaaaatttatctcaatttgatgtcataggtatagatgaaattcaattttttgataatgaaattgtacatatagtagaaaagctagctgaagatggtcatagagttgtagtagcaggattagacatggactttagaggtgaaccttttgaccccatgcctcaaattatggctgtaagtgaacaagtgaccaaattacaagccgtttgtgcaatatgtggttcgtcatcaagtcggacgcaacgtttaattaatggacaaccagcaagaattgatgatccaattatattagtaggagcaaatgaaagttatgagccaagatgcagagcacatcatattgtagcacctagcatcaatgacaaggaggaaatatagtgtttgatcaattagatattgttgaagaaagatatgaacagttaaacgaaatgttaagtgatccagaaattgttaatgatccagataaattacgaaaatattctaaagaacaagctgatttacagaaaacagtagatgtttatagagattacaaaagtaaaagagaagaagtagcagaaatagatgaaatgctaactgaaacagatgataaagaagaaattgaaatgttaaaagaagaagcatcaggattaaaaggtgaacttccagaattagaagaacaacttaaattcttgttaattcctaaagatccaaacgatgaaaaagacgttattgtcgaaattagagcagcagctggtggagatgaagcagctattttcgcaggcgatttattaagaatgtatacaaaatatgcggaatctcaaaattttaaaactgaaattgttgaagcggcagaaagtgatcatggtggatataaagaaatcagtttttcagtttcaggtagtggtgcttatagtaagttgaaatttgaaaatggtgctcatcgtgtacaacgtgtgcccgaaacggaatctggaggacgcattcatacatctacagcgactgtagctgttttacctgaagttgaagatgtagaaattgaagtgcgtaatgaagatttgaaaattgatacgtatcgttcaagtggcgctggtggtcaacacgttaatactacagactctgctgtacgtattacgcatattccaaccggtattattgcaacgtcttcagaaaaatcacaaattcaaaaccgtgaaaaagcattaaaagtattaaaagcgcgattatatgatatgaaattacaagaagaacaacaaaagtatgcggctcaacgtaaatcagctgtagggacaggagatcgttctgaacgtgtaagaacttataattatcctcaaagtcgtgtgacagatcatcgaattggtttaactttacaaaagctcgaccaaattatggaaggtaaattggatgaaattattgatgcattaacactttctgagcaaactgaaaaactgaaagaactaaataatggcgagctttaaagataccttacaagaagcaattgaattaacaaaagaaaaaggatttgaacaatctagagcggaatggctgatgttagacttatttgaatggtctaggacagattatttaatgcatatgtatgatgagatgtctcaagctgaagaagcaaaattttcacttgcattagaccgtatgttattaggagagcccattcaatatattgttggttttcaatcattttatggatatcaattacaagtaaattctcattgtcttattccacgtccagaaacagaagaagtcatgcttcattttttagagcattgtaaggatgggagtacaattgctgatataggaacaggcagtggagcgattgcaattgtacttaaaaaactaaatccaaccttaaatgtaatagccacagatcttattgaagatactctagaggtagcatctgataatgcacatcaattaaaagcggatatcagatttctaaaaggtaatgcccttaaaccacttattaaagaaaatattaaattagatggcttaatatcaaaccctccttatattgatcaaactgagatgaaagatatggaagatacagtagtaaagtatgaacctcatatcgcgttatttgctgaagatgaagggtatgagatttatgagatgattctagatgatttacccaaagtacttaataaaggggcttatgtaacttttgaaattggttataatcaaggagaaatattaaaagcacgtattataaataaatatccgcatgttaatgtaaatctcttgaaagatattaacggattaaatagaatgatttcatttaagtggtaatagtggagtgggaaagaaatgtattattttctaacccacttctttttctttaataacttcacatatgtgaaaggtgtgatcaaaatgaaaacaaaaatatggaatatgaaagattatagtcaagattcccaaacgttttctcaattagcagaaataaaaactatttatgaaaatgggggcctaattgcgatacctactgaaacagtatacggtttaggtgccaatgctaaaaatgaacaggcagtagaaaacatttataaagctaaaggacgtccgtctgataatccactgattgttcatatttacaagcaatcacaaatggatgcatttgtatccactatccctaaggaagcccaaaaattaatgaatgcattttggcctggcccaatctcgtttattcttcctttaaaacaaggatacttatgtgagaaagtgacaggtgggcttaattctattgctgtaagaatgccaagtcatccaattggaagagccatattagaatatgttgatttgccaatcgcagcacccagtgcaaatataagtggaagaccttctccaacgacatttcagcatgtgtataatgatttaaatggaaaaatagatggtattgtaaatggggatcaaagtgaagaaggcttagagagtacagttttagattgcacacaatttccttttagaatagcaagaccaggctcaattactcaaacaatgcttaatcacgtggtacctcacagcgtcattcaatatgattataatcaattagaacggcccatagcaccaggtatgaaatataaacactatgcacctaaaacacctgtatatatgttaactgaatttacacaacctatttctgagttaaatgaatcagggttagcatttgttttaccttctagtatgaaaaagtatgtacctaaagattgtacatttatctctctttgtgaaaatcaaagagatgttaaaggggctaatcataacttatataaaattttacatgacattgatgatgatgaacgaatacaaaaagcatttatttatacttttgataatattgaaggctctgaagcagttatgaatcgtatgatgaaagcaacgggaaatcaaatagttaaaggaagagaattatgaagataatatttgtatgtactggaaatacgtgtagaagtcctattgcagaaagtatagctacagtgcttctacctaacgattctattcaatcacgtggattatttgcaatgaatggacaatctatcactcctgaagcattagaagttattttagaaaataatttaccagaaccctctgtatctcaaatattcagtcaagatgacttaaaaagtgatttaattttaacaatgaccgataatcataaaagacagttaatcagtcaatatgggacagaatatcctatctatacattatgtgagtatgtatcagaaacaggtgaaataggtgatccatttggcggtagcatagatacctatcgtcacacatttaaccaattatacgctcttattaacaaattgaaacacgaagaataaagagaaatattacgctaatagtataagttgagtaataaataagttataataaaaaagtatagcttgtcagctatgcttctttttatctttgcaagtgaggtgaaataatatgcaagaacttacaactttactggatgaattgaaatcccaatcttttttcaagaaagatgagatgtgtgtgataggatgttcaacttctgaagtaattggggaaaaaattgggtcagttggttcaatggaagtcgctgaaactatttttaatgaattagaacgtataaaacgtgaaacgggcgtttcatttgcgtttcaaggttgtgaacatatcaatagggcgattacaattgagcgtgaagattataatccatttactatggaagaagtaactgttgtaccagatgttcatgcaggaggaagtcttgctacatatgcctatcaacatatgaacgatccaatagtcattgaatatataaaagtgcctaaaggtattgatattggtcagacgcttattggaatgcacattaatcatgtttgtgttccattgagaacaagcgttaaaaaagttggtgaagctatagttacaatcgctacttcaagaccaaaaaaaattggtggagaaagagctaaatacgaataagttctaaaggaagaaggggaatatatgtcttatattaaagaacaagatcacattatttatgaagcgattcaaaatgaatataaccgtcaaaacaataatattgaactcattgcttcagagaactttgtttcagaagcgataatggaagcgcaaggatctgtaatgacaaacaaatatgcagaaggctatccaggtcgtcgttattatggtggttgtgaatatgttgatgttacagaaacaattgctattgaacgtatcaaagctttattcggagctgaacatgcaaatgtacaaccacattcaggttcgcaagctaatatggcagtgtatttagttgctttagaaatgggagatactgtgcttggaatgaatttaagtcatggtggtcatttaacccacggtgcttcagttaattttagtggtaagttttataactttatcgattatggtgtagataaagaaactgaaagaattaattatgatgaaattcgtgaattagcactgaaacataagcctaaattaattgtagctggtacgtcagcgtattctagacaattagattttaagaaatttaaagaaattgctgatgaagttggtgctaaattaatggttgatatggcacacattgcaggtttagtagcaactggattacatcctaatcctgtagaatatgctgactttgttaccagtacaactcataaaacgctgagaggaccacgtggaggcctaattctttgcaaagaaaaatataaaaaagagatagataagacaatatttcctggaattcaaggtggaccactagaacatgtgatcgctgcaaaagctgttgcttttggagaagctttagaaccagatttcaaagtatatcaagaacaagtcattaaaaatgctaaaactttagctgaaacacttcaagatgaaggatttagaattgtttcaggaggtacggataatcatctagtttcagtagatgtgaaacaatcagttaatttaactggtaaacaggctgaagaaacattagattcaattggtattacatgtaataaaaatacaataccttttgatcaggagaaaccattcgttacaagtggaattagactaggcactcctgctgcaacgacgcgtggttttgatgaagtagcatttaaagaagtagctttaattatcagtacagcattaaaaaattcaaatgaccaagcaaaattgaaagaagctagtgatagagtaaaacaattgactcaacaatatccgctatatgaataacaacataaatggaggaaatgaattatgagtaaagtacatgtatttgatcacccactcattcaacataaattgagttacattcgtgataaaaataccggaacaaaagaatttagagagcttgttgatgaagtaggtatgctaatggcatatgaagttacaagagatttacaattgcaagatgtagaaattgaaactcctgtaacaactatgacagccaaacgattagctggaaaaaaattagcaattgtacctattttaagagcaggcttagggatgacagatggtgtattaaacttagttccagctgctcgtgtaggacatattggattgtatcgtgatcctaaaacattaaaagcagtagaatattttgctaaattacctcaagatattgatgagcgtgaaattatagtagttgatccaatgttagctacaggcgcttcagcaatcgaagcaatcaattcactaaaaaatcgaggtgcaaagaatattcgttttatgtgtttaattgccgcacctgagggtgttgaaaaaatgcaagaagcgcataaagatgttgatatctatattgcagctttagatgaaaaacttaatgaaaaagcatatattacacctggtttaggagacgctggggatagattatttggtactaaatagtactataggagtaaatattatgagaaagattatgacagtctttggtacaagaccagaagcaattaaaatggcacctttaattaaagcacttgaaaaagattcaatgctagaaccaattattgttgtaactgctcaacatagagaaatgcttgattcagttttaaaaacattcaacataacaccccattatgatttgaatatcatgaaaaaagggcaaactctttcagaaataacagctagatctattattcaacttgagcaaattatgaaaaaagaatgtccagatatggtacttgttcatggtgataccacgactactttttctggcgcattagcagcattttataatcatacatctgtaggacacatagaagctggtcttagaagtgggaataaatatgcgccttttccagaagaaataaatcgacagatggttagtaacattgccgatttacactttgctcctactattggtgcaaaacacaatctaattcaagaaaataaagataagacatctatagtgattactggcaatactgccattgatacactaaattttacaattaataaaaattatacctctgagttgatagaaaagcataaaaataaaaaaattgtattgctgaccgttcatcgtagagaaaatattggaaaacctatggaacatattttcaaagcagttagagatatcgttgaagatattgaagacgtggtagtagtttttcctttacatatgaatcccgaagttagaaaactatcatacgcttacttagaaaaacatccaagggtagagcttattgaaccattagatgttgttgattttcataattttgctaatcatgcttatttaattttgactgattctggcggcattcaagaagaagcaccatcattaaataaaccagttttagttcttagagatgtaactgaaagacctgaaggtgtagaagctggaacattaaaagtaattggaacagagtatacacatgtgtatcaagaaataagaaaattattaatgaacaaacaagtttataataatatggcatatgctcaaaatccttatggagatggaaaggcatctgaacgtatatgtgaaagcattaaatactatttaggattaaccgaagaaatacctaaagaatttgaaaagttaaaaaattgttgatttaattgtgaacattttatgacaatattggtgttaaattaaacaacaatttgaatagaattgacacataaattaccctatattattattaaatttgtatgagtggaacggtttccatgattgtcataagttttggaggcacaaagaatgaaacggttcagcatcatatttagacaattcattcaatattacatttattttttaataatgttaagtattttgtattttattaaatctaattcttttttattaggcttaataattgggacactcgggtctctaatcaacacatacatttttgagatatatctttctaggacaaaacaaccagataatatacatatttctacaggcaatgtatggagatacttagtcgcaattattgcatgtatagtatgggttgtctttaaagagaatgtaaatatcattggtataatgataggccttatgatttcttatgtattaatcattttacgccctctcttgctaaaatagtaaactatatacagaaagaggtgagtacatggatcacaaatccccactcgtaagttggaatgtgtttggatttgatattgttttcaacttagcaagtattatgatgcttattattactgctattattgtttttataatagctattgtttgtacgcgtaatctcaagaaaagacctagtggcaaacaaaactttatcgaatggattttcgattttgtaagaggcattattgagagtaacatggcttggaaaaaaggtggtcaatttcacttcttggcggtaacattaattttatttatttttgttgccaatatgctaggtttaccatttgcaattgttacacatgatcattatttatggtggaaatctccaactgctgacgcgactgtaacgttgacgttatctacgatgatgattttattaacacattattatggtgttaaaatgcgtggaacaaaggcatatgttggtaattactttaaacctttctggccattagcaattattaatgtctttgaagaattctcttcaacattaacactaggtttacgtctttacggtaatatttttgctggtgagttactattatcactattagctggcctgtttttccaaaacggctggggctggataattagtattcctggcttaattatatggcaaggattctcaatctttgtcggtacaatccaagcatatatctttattatgctatctatggtttacatgtcccataaagttgcggacgcacattaacataaacaaacattttaggaggaattattaatatgggtttaatcgcagcagcaattgcaatcggtttatcagcattaggtgctggtatcggtaacggtcttattgtttcaagaacagttgaaggtgtagcacgtcaaccagaagcacgtggtcaattaatgagtattatgttcattggtattggtttagttgaagcattaccaatcatcggcgttgttatctcattcatgacattattcagataagaaatgttcgaggcgaagtctctttgatcttcgccattcgttttatttagtggcaaagtgatgattaataatgaaaggagtgtcaaatgccagtgaatgcattaaccaattcatttgttttaggtgcagctgcaggtggcgttgaatggggaacaacaattgttacaattattacatttattatcctattggcgttattgaaaaaatttgcttggggtccattaaaagaagtaatggataaacgtgaacgcgatatcaatagagatattgacgaagctgaagaagcaaaattgaatgcacaaaaacttgaagaagaaaataaaaagacacttaaagaaacacaagatgaagttcatcatattcttgaagatgcaagaattcaagcacgtaaacaacatgaagaaattattaaagatgcacatgaacgtgcaaatggtatgattgaaacagcacaaagtgaaatcaaaagtgaaaaagaacgcgctcttgcagatattaataatcaagtttctgagttatctgttttaattgcttctaaagttttacaaaaagagatttcagaacaagatcaaaaaggtctcgttgataagtatcttaaagaggcaggcgataaataatggcagatgtagcaaaaaaatatgctaaagctttatttgatgtctctatagataaagatcgattagatttaatgtatgaagaattaaaagaagttagtaatgcaactttaaattacattgatgatttaaaagcaattgattcaaatcctaatcaacctgcttctgaaagacgtaaatttgcaggtattgtatttggggatgcgaactattacttaaaaaatatgctaatgattttagcaaataatcgtcatttagcgcttatacattctatctttaaagaatttaaacatttgtatgaccatcattataatcaaggtgatgctttggttgaatctgtatatcaattgaatgaagaagaattatctcatattgaaagagtaattcttaacaaaactaaattgtctaaagtacatattacaactaaaataaatcctaacttaattggcgggtttagagcaaaagttgggactactgtattagatggtagtataaaaaatgatttagaacaaatagagcgtaaatttaaaagagttaattaaaaaagaggagtgacatagatggccatcaaagctgaagaaatcagtgcattacttcgctcacaaattgaaaactatgagtcagaaatgtctgttgatgatgtaggtaccgtccttcaaattggtgatggtattgcattaattcacggattaaatgattgtatggctggtgagcttgtagagttttcaaacggtgtgcttggtttagcacaaaaccttgaggaatcaaatgtgggtgtcgtaattttaggaccttatagtgaaattagagaaggcgacgaagttaaacgtactggccgtatcatggaagtgccagtaggtgaagaacttatcggacgtgttgtaaatccacttggtcaaccaattgatggacaaggtcctatcaattccactaagacacgccctgttgagcaaaaagcaacaggcgttatggatcgtaaatcagttgatgaaccattacaaactggtattaaagcgattgacgcattagtaccaattggtcgtggacaacgtgagttaatcattggtgatagacaaacaggtaaaacaacgattggtattgatacaattttaaaccaaaaaggtttagatacaatttgtatttatgtagctattggtcaaaaagattcaacagtacgtgcaaacgttgaaaaattacgtcaagctggtgctttagactacacagttgttgtatctgcatcagcagcggaaccagcaccattattatacatcgccccttattcaggagtgacaatgggtgaagagttcatgtttaatggaaaaaatgtacttgttgtatatgatgatttaactaaacaagcagctgcttatcgtgaattatcattattattacgtagacctccaggccgtgaagcgtatccaggtgacgtcttctacttacacagtagattattagaaagagcagctaaattaaacgatgcattaggtggcggttcaattacagctttacctatcattgaaacacaagctggggatatctctgcatatgttccaactaacgtgatttcaattactgacggacaaattttcttacaatctgatttattcttctcaggtgtacgacctgcgattaatgctggtcagtctgtatcacgtgttggtggttcagcacaaattaaagcaatgaaaaaagttgctggtacattacgtttagatttagcatcttatcgtgagttagaatcatttgcacaatttggttctgatttagacgaatatactgctagaaaattagaacgtggtaaacgtacggttgaagttttaaaacaagatcaaaacaagccacttcctgttgaaaatcaagtgttaattatttatgccttaacaaaaggttatttagatgatatccctgtagaagacattacacgttttgaagatgaattaaatagttggtctaaatcaaatgcttcagaattattaggggaaatcagagaaactggtaatcttccagatgatgctaaatttgaatcagctattaatgaatttaagaaaagttttagcaaatctgaataactaaactttaaatcaaaaaggtggtgagataatggcttctcttaaagagatagatagtcgtattaaatcgacgaaaaaaatgaaacagattaccaaagcgatgaacatggtttcaagttctaaattacgtcgagctgaaaaaaatactaagcaattcgaaccctatatggaaaaaatgcaagatgcgataactgctattgcaggcgcaagtaaaaattcaaatcatccaatgttaagaccaagacatattcaacgtagtggttacttggttattacaagtgacaaaggattagcgggtgcttatagttcgaatgtgcttaagcgactagtcaatgacattaaagaaaaacatacaaatagtgatgaatatagcattattgttttaggtcaatccggtgttgatttccttaaaaatagaggttatgaagttgaaagttcacttgttgatgtacctgatcaaccttcatttaaatcaatacaagctatcgctaagcatgcgattgacttattcagtgaagaacatattgatgaacttaagatttattatagccactatgttagtgttcttgaaaataaaccttctgttaaacaagttctaccattatctcaagaagattctagtcaaggccaaggtcaaatgtcttcatatgaatttgaaccagataaagactcaatcttaagagttattcttccacaatacgttgaaagtttaatttatggaacgattcttgatgctaaggctagtgaacatgcagcacgtatgactgcaatgaaaaatgcatctgataatgcaactgaacttattgatgacttatcattacaatataatagagcgagacaagctgaaatcactcaacaaattacagaaattgttggtggttctgccgcacttgaataatattttaaaggaggaaacaacatgggtaatggccgtgtaactcaggttatgggtcctgtaattgatgttcgattcgaacataatgaagtccctgaaattaataatgccctaattattgaagtacccaaaaatgatggcacatttaaattaacattagaagttgcattgcaactaggtgatgatgttgttcgtactattgcaatggattcaactgatggtgttcaacgtggtatgcaagttgtgaatactggtaaagatattagtgttcctgtaggggaagaaacacttggacgtgtgtttaacgttttaggagaaacaatagatttaaacgaaaaaatagatagttctgttagacgtgatccaattcatcgtcgtcaacctaattttgatgaattatctactgaagtagaaattcttgaaacaggtattaaagttgtagacttattagcaccttatattaaaggtggtaagattggtttattcggtggtgccggcgtaggtaaaactgtattaattcaagaattaatcaataatatcgctcaagaacatggtggtatttctgtattcgctggtgtaggtgaacgtactcgtgaaggtaacgatttatactatgaaatgagcgatagtggcgttatcaataaaacagccatggtatttgggcaaatgaatgagccgccaggtgcgcgtatgcgtgttgctttatcagcattgacaatggctgaatatttccgtgatgaacaaggtcaagatgtacttttattcattgacaatattttccgctttactcaagctggttctgaagtttcagcattattaggacgtatgccttcagctgtaggttatcaacctacattagcaactgaaatgggtcaattacaagaacgtattacatctactaataaaggttcagtcacttcaattcaagcagtattcgttcctgccgatgactatactgacccagcaccagcaactgcgttcgcacatttagatgcaacaacaaacttagaacgtaaattaactgaaatgggtatttatcctgcggtagacccattagcttcaacttctagagctttagaaccatctattgttggacaagaacattatgaagttgcacgtgaagttcaatctacattacaaaaatacagagaattacaagatatcattgcaattttaggtatggatgaattatctgaagaagataaattaacagtagaacgtgcgcgtagaattcaattcttcttatcacaaaacttccatgtggctgaacaatttactggtcaaaaaggttcttatgttccagttaaaacaactgtagcgaactttaaagatatcttaaatggtaaatacgatcatattcctgaggatgcattccgtttagttggaagtatggatgatgttattgctaaagctaaagatatgggtgttgaagtttaaactaattaggaggtaaagataatgaacacagtaaatcttgatattgtcactcctaatggttcagtctacgaaaaagatgatgttgaactcgttgtatttcaaactactgcgggcgaaataggtatcatgagtggacatattccgacagttgccgcattaaagataggccatattaaagttaagtttaagaatggtactgagtatatagctgttagtggtggctttgttgaaattagacaacataaagtatctgtcattgttcaaacagctgaaacagctagtgagattgatgtagaaagagctaaattggcttgtcaaagagcacagtctcatttagatgaagaggataacagtgacattaaccgagctaaacgcgcattagctagagcggaaaaccgtctgcgtgtagctgaattaaaataatgattaaatgacgtgggataatatttatgatgaatatattgtctcactttagtgagaatggttaatgaaaaagtaacaggtattaaaatattttgatttagttaattattcttaatatattaaaagagtttgagacatttaatagtgtttcaaactctttttttattgtacataaaagaacttagaataataataactttaaatttttattttagttactttttattaaatattgtaacgttcttatgtatcattattaacttttttaatgtacaatatattacagaaatctttaaggagagaaaagaatggaatatgttggacaatttgcaataatacatttatttttacatgtaatatgtatatgtattgcgtactggacattacattctctcagattagatcaattttttaaaaaaggatattcaacacgactgcaagtgtgtatgattttcttagcaattttaatgggtactgcagtaagtaactttatcgtagatttattacagtactctacacaaattaaatatttattttaaaaaatgaatttctatcaattaactaaaaatgtagatatactaattaaataagtaattcaaaatgggaaatgttataagaaataggagtttaatgtggaggattaatatggataagataattataaatggaggcaatcgccttactggtgaagttcaagtagaaggagctaaaaatgctgtattacctatccttacagcatcgttattagcgtctgaaggaaaaagcaaattaaccaatgtgcctgatttaagtgatgtggttactatcaataatgttttatctactttaaacgctaaagtggattatgataaagaaaatggatcagttacagttgatgcttctgctacactaaatgaagaagcgccttatgaatatgtgagtaaaatgagagcaagtgtgttagtaatgggacctttattagcacgtctaggtcatgcaatcgttgcattaccaggtggctgtgcaattggtgctcgtccaattgaacaacatatcaaaggttttgaagcattaggggcagaaattcatttagaaaacggaaatatatatgcaagcactaaagagggattgaaaggtgcaaatattcatctagattttccaagtgtaggtgcaactcaaaatattataatgggtgcttctttagcacaaggaaaaacagttatcgaaaatgtagctaaagaacctgaaattgtagatctagctaattatatcaatgaaatgggcggtaacgttattggtgctggtacagataccattactatccatggtgttgagaaattaacaggagttaaacatgcaattatacctgatcgcattgaagcaggtacatttattatcgcagcagcaattacaagaggagatgtttttgtaaaaggtgctgttaaagaacatatgacaagtttaatttataagttagaagaaatgggagttaatctcgattttaatgaggagggtgtacatgtcactacaaatggtgaacttcaacctgtagatattaaaacactgcctcatccaggtttccctacagacatgcaatcacaaatgatggcattattattaacagctgaaggtcataaagtggttactgaaacagtatttgaaaatagatttatgcatgttgcagaatttagaagaatgaatgctaatattaatgtagaaggtagaagtgctaaaatagaaggtaaaagtcaactacaaggtgctcaagtaaaagctaccgatttaagagctgccgcagctcttattttggctggtttagtagcagaaggcacaactcaagtgacagagcttaaacacttagatcgtggttatgttaatttccatgagaagttaaaatcacttggtgcagatatcaaaagagtcactgactaatttttaaatagatttgaggtaatagttatggaaaccatttttgattataatgaaataaaaaaaatcatccctcatagacaaccttttttacttattgatcgtattgttgaatatgaagaaggaaagcgttgtgtaggtttaaaacaagtttcaggaaacgaaccatttttccaagggcattttcctgattatgcagttatgcctggtgttctcattacggaagctttggcacaaactggagcagtagctatgttaaatagtgaagaaaataaaggtaaaattgctttatttgctggtattgataaatgtagatttaaaaaacaagtgacacctggtgatactttaatgttagaagttgaaattacaaaaattaaaggtcctattggaaaaggtacagcaaaagctactgttgatggacagcttgcttgtagttgtgaacttacttttgctattcaagatgcataatttaaaatagagtagtagcgaaataaatcatttcgttattactctatttctattttttaaatttttcttcttttaatttcggcttagattgcatcattctgttgaatgtgattttcaattcttctcctgataatccttcatcaataagttgttctaatagagtttctgcgtatacttgtcgatgtgtataaatatgacactcgaaaataattgacatttttcctgcaaatagagaaatgttttttattgttgcatcaaacaatgctggatcgttagaaggtctagtaatcactactctgatatctaatattgtttgtgattcataatatttttgcatgatatcataatgtgtatctgaaattacaatttccagaagccaacctgtaccactactttctttatttataatcacaccatcataaagttcaaattctgaaatcctgttaccatcgcttactatttggaatcgaactgctttaaacgtcttcataacattactcctatactcttaaaaatttttaaattatatgattattgtttttttgttaaataagaagtgtcatatcttaatatttttcttaaatatatcagatattaatactaaaaagggaagaaatttaaaaaaatagctttttgacgttatattcaattctatttaatataacgatataaggaggtgacacatgttaaataagatagtaatcgttggtcgtatgactaaagatgcaaaaatttataataatgaggaggtgaaaatcgcaacgtttagtgtggctactgaacgtaattataaagatgaaaatgatgaaatagcgtgtgactatatattgtgtaaagcatttggtaagatggccagtaacattgaaaaatatacttctcaaggatcattagtaggtattactggccaaatgcgttctcgtaaatatgaaaaggaaaaacaaactcactttgtaacagaattatatgttgaaacaattaaatttatgtcccctaaattaaataatgaaaaactctcagataactcactaaatacagacacttatccatttgatcatctcgaattaatgaatataaaataaaactctctatttttaatactccaaacctttccaattaatataaaataagtctttcaattatactcaaatatactcaagaggtcggtataaatattccgacctctttaactatgtatgagacattagatacaactaattcattgaatgataaaaaatacagttcatttttctgaaatattacaagatgattacagttaattcttttattatatatctaataaatactgccattaaagtttttatagtatatatataagaagaattatctataaacctatgtaattttaatgtaaaataaatacattcttttttatttcactgtaacctgctaagctttttaagatgttagagtagtatctgtaaattatttaagaaaataaatgacttaggaggattatactattatgaaaaagacaattattgcatcttcattagcagtaggtttaggattagtagcaggaaacgtaagtcatgctgatgcaagtgaaaatcaaattaataaagaaaaattagctcaattagcggaatctaacgatcaatcattaaatcaacatcctattcaagaaggagcatataattaccaatttaatttaaatggtaaaacttatcatttttggtcagatggaacatattttaaatgggaatattatccatcaaacggttcaactgtaaatagtgctaatcaaaatgtagcttcaactcaaacagcacaaaatgtatcttaccaaaataataattataaaaatataaatcaatcagcttcaacttcaaatgtaagtcaacactatgcaaatgaagctcaaacacaacaagcaccaaaaacaacacaaactaaacaagcaactcaaacacaacaagcacctgctaatgcaactacaaatcaacctaaacaatcaacaagtggttcttctgtaaatgtaaatagtcatttacaacaaatcgctcaacgcgaatcaggtggagatattcatgcaatcaacccttcttctggtgcagcaggtaaatatcaattcttacaatctacttgggattcagtagcaccagcacaatataaaggtgtatcaccagcacaagcacctgaaagtgttcaagatgcagcggcagtaaaactttataatactgcaggtccatctcaatgggttacagcgtaaaacttaataaataatttactagtgcctgagacaatatgagttgtcttaggcattttatatatattgatagtaatgactgaatttaaaaagatttctgtactattctttatttattatatttataataatagttgtatgaattaaacttatttcaatgaatatcttttttatttgaattataacaatggttttgttatggttaagttaaactaaagactactaggggagccatggaatatggctgagatgaagcattcagacccttataacctgatttggttaatgccaacgtaggaaagtagtaatacatattcattcattctatttttttgaatattgactacatttctacgttgaaatgtagtttttttatttaaggaggaatagttaatgagtttttcagatgaattaaagcaagcgtcaaagccaattattgaagagatttataatgatggttttattcaagatttattaaaaggaaaattatcaaaacaagcagtacgccaatacttacgtgctgatgcttcttatttaaaagaatttactaatttatatgctttacttattcctaaagcacctactatgaaagaagtgaaattcttagtagaacaaattgaatttatgttagatggcgaagtagaagcccatgaaattttagcggactatattaatgaaccttatgaagaaattgtaaaagaaaaagtgtggccacctagtggagatcattacattaaacatatgtattatcatgcttatacccacgaaaatgctgcatacactatagctgcaatggcaccatgtccttacgtatatgaagtggttgctaaatggggattagaagattcaaatcttaatagagatgcacttactgctaagtggtttgatttttatagcactgaaatggcacctttaattgaagtatttgaccgtttgttaaatgaacttacagaacattgtaccgaacaggaaaaaagagaaattaaagaagcatttttacaaagtactgtacatgaacgtcatttctttaatatggcatacattgatgaagaatgggattttggaggagcaaatcatgaataaacctaagattgcgttaacagttgctggtactgacccttctggtggcgcaggagttatggcagatttaaaatcattccatgcttgtggcgtatatggaatggctgctattacaagtattgtggctcaaaatactaaaggagttcaacatatccataatctagaaactagttgggttaaagaacaattagatagcgtgtttgatgatgaattacctcatgcaattaagactggaatgattgctacacatgaaacgatggaactgattcaaacatatttaaaaaatcatagcgatattccctatgttatcgatccagttatgctagctaaaagtggcgattccttaatggatgatgaaacaaaaaaacatcttcagaaaacgctcttaccattagcggatgtcgtgactcctaacattccagaagctgaagaaattactggcttgaaaattgatactgaagataatattcgtaaagcaggtcatatatttataaatgaaataggaagtaaaggtgtagtaattaaaggcggtcattctgctgatttaaataatgctaaagactttttatttactaaagatgatgtctatacttttgaagagaagcgatttaatacgccacatactcatggtacaggttgcacattttcagctgttatcacagccgaactagctaaaggtaaaaccatttatgaagctgtaaaaaaagctaaaaaatttatttcattaagtattgaacatacacctgaaatcggtcaaggacgcggcccggtaaaccattttgcttatatgaagaaagtaggtttagacgatgaatagtttagaaaagataagacaagagaatccactagtagtctgttataccaatgatgtggttaaaaacttcactgcgaatggactcttgagtattggtgcaagtccagcaatgagtgaagctccagaagaagcagaagagttctataaagtagcaggggcactgcttataaatattggaacattaaataaagcaaatgaaaaagatattttagaaattggaaaaattgctaatcaacaaggtacacccattgtatttgatccagttgctgtaggtgcatcaacatatcgtaaacaattttgtgaatcttttctttctgaaataaatgtttctgtaattaaaggtaatgcatctgaaattcttactttagtagattcaaatactacaatgaaaggcactgatggagaaacagacttagatgtagtgacaattgctaaaaaagcttatgaaaaatatcaaacagcaattgttattacaggtagagaagatgttattattcaagataatcaaattgtcaaattatcaaatggttctccattacttgcaaaaatcacaggcgcgggttgtttattaggcagtttagttgctggatttttatttagaaatacacatccgtcattacaagtattagaagaatcagtaagttattataatatcgccgcagagattgctgaaaaaagcgaaaaagttaatggacctggaacattcttatctcaattacttgatgaaatgtatcaacttaactatgatacttataaacaatttgtaaaacgtaaagaggtttaaatatgtttgattcaaaaagcttacaagtctattttatatgtggaacacaagacatcatcggtgatcaaaatattaaagatgttttaaaagcagcattagaatcaggaattacattatttcaatttcgagaaaaagggccaaatgctttagtaggggatgaaaaagaagtattagctaaggaattaaaaacactttgtcatgagtataaagtaccttttctaattaatgatgatgtggatttagctgaaaaaattgatgcagatggtatacatgtaggtcaagatgacgaaataattgcttcttttgctaatcgttttaaaaataaaattatagggttaagtgtaggaaacgtaaaggaatatcaacaatcagatttagaacacgtagattatataggtgtaggtccaatgtatgagacatcttcaaaatctgatgcaagtgcccctgtaggtcctgaaatgattgcaacattaaaaaatattaatccaagcttacctatggttgctataggtggtattactgaagacaattgtgaacttatagctaaagaaggcgctgatggtgtgtcagttatttcagtcattacacatagtcaaaatattgacaagactgttaataaattaaagcactatttcaaataaatatctctttttttcagtttttgttttctagtacaccctatctatgataaaattatttctacgtgaatatatcaatagaggtgtaaaaatgaagaagaaagcgctactacctttgttattaggggtaatggtctttttagctggatgtgactattccaaatctagtaatagaaatggatttttctacaatacattcgttgaaccaatggctaaaattctacattggttaggccattctgtttttcatgatgattatggtattgcaatcatcgttttagtattagttattcgtattatcttattgcctttcatgctatcaaactataaaaatagccatatgatgcgtgaaaaaatgaaaattgctaaacctgaagtagaaggtgtacaagaaaaagttaagcgagcacgtactcaagaagaaaaaatggctgctaatcaggaaatgatggaagtttataagaaatatgatatcaatcctatgaagagtgctttaggctgcttacctgttttaattcaaatgcctattgttatgggattatatttcgtattgcgttatcgtattggtggcggtattacagaacatccacatttcttatggtttaatttagtacatcctgatatttggattactattattgccggtgtgttatactttattcaagcatgggtgtcaagtaaacaaatgcctgaagaacaacgtcaaatgacttatatgatgatgattgtttcacctattatgattatttggatttcattaagttcagcttcagcactaggtttatattggtctgtcagtgcggcattcttaattattcaaatattctttgcaaataaacattatgaaaaagttgcaaaacaagaaattggacctatggttgaggcacataaagaaaataattcaaataaaaaaggtaaaaatacgcaagttgtttctaaaaataataagaagaaaaaataatataagcataatacgataaaaagtaggaaaagatagatgatcttttcctactttttttattcttctaagtgccactcgctataaaattgagataaaaatagtttcataaattgatgacgttcttcagctagttgaaatcctgtttgtgtatgcattaatttttttaattttaataacttatcatagaagtgtctaatagcagaaggaggtaaatcaaccatatctttttctgaaggaattgaatgatagggagattctgtccacatcggctcattgaaatgtccagaaaattgaaacgttcttgcgatacctatagcaccaatagcatctaagcgatcagcatctctaacgatttgtccttcgattggaagtgtaacatcgttatttctaccatttcgataactcaaatgtttgataataaaaataatattcttttgaacagtatcatccaattctatttttttaaaaaattgatgtaattcgcttaaagcatggtgtttatcagtcaatttatcatctatgacgtcatgcaataaagctgacaatactattgtaagaaaatcgccttgatgttcttgtttggcaatatatttagctaataatgtgacacgttcaatatgtgcaatatcatgtccagagtaatcatttttatgaaattggtacatatattctttagctaataatatttgttctgcttgattcataaactactcctttaaaaacatgtattgaatgagtttaaagaataggtgataataattgagatatgccttctttaaacttaatccaagtactacgttgattatataattctttagtcaactcatatgagactttcatatctttaataaatgcttttttaagttgaagagaaatatcttcgtcataaatgaacgcattcacttcgaaatttaatgaaaaactacgattatccatatttgctgtacctacagtagcaatttcatcatcgacaatgagtgtttttgaatgtagaaatccattattatattgatagattttaacacctgcgtctaataaagaagcggcattttttaatgtagcccaataaacaaaaggatgatcgggtttacatggaatcattaaattaacttcaacaccacctaaagcggcaatttttatggcatcaataaaagcttgatcaggaataaaataaggtgattgaatataaatagaatgttttgctgacataatcatctttaaatagccatatttaatttgttcccagtcttcatcaggaccacttgaagcgatttgaacaccaatctcgccgcctgaatctacatcaggaaaatatctatcttcatatttgatattgtcacgtgttgattgtgaattccaatctaagatgaatcttaattctaatgcattgacagagtcaccttcaagtcttaaatgagtatctctccaataaccaaattttttatctttaccaaggtattcatcaccaacattaacccccccaacataaccaatcttgccatctataattacaatttttctatgattacggttattcattcttaaattgattaagggcaatttggaagggaagaaggcttctgcgtgtccacctttgtctttaaactgtttcaaatctttcttgcgtaatgttcttgagcccatatcatcatataacattttaacttctataccatcttcaagtctgtcttcgagtgcctttaaaatacgacgtccaagatcatcacttttgaaaatatagtattgaatatgtatataatctttagcattctgaatatcttcaattaatgcgtcaaatttagcatgaccatctgtaaagatttttatactgttatcagtagttaagaatgcagcattattatagagtaacatgtgcaccatttctttaaacttaacaatttgatgattacctttagaaaaatcatctttttcaagtgcatttaattgctcatcaactatcatagctaaacctttacgatcttctttttttaatttgaaaatatgtttgcgttgtatttgacgccctaataatagatataaaataaatcctactatcggtagaaatacaagaactaaaagccacgcccaaatggaacctgcactacgacgttccatgaagataatgataaatgcgaaaatcaagtttaatataaaggcagtgattaatatgatgttaataattaaagaagagtgtgagaaagataattgcacgatctctaccatattaattaattgaacctcctaaatcgtttaaaattaatgtactaacaaatattgtaccatgcactataataaatggtatgattaatttttaaaataaaaatgtataattgacgtaataaagaggaaattatacgatgatatagaagctatgaaagggtgaattagttggaaaatcaaaatcatgcccatcattctgagcaagttaaattaaatttaaaatctcgattaaatcgaatagaaggacaagttaaagcaattaatcgaatgattgatgaagacgtctactgtgatgatgtattaactcagataagagcaacacgttcagcacttaatagtgttgctactaagttactagaacatcacatgaaaagttgtattatggaaaaaataaatcaaggtactgaagaagaagcaatggaagaactactagtgacatttcaaaaactagtgaaagattagttaggagattgtaatatgttaaacagtaatattgtatttatagataacattgaaacagaagaacaagcacaaatgttaaatgaacgtttgttaaatatgattggagtacatacggtatcaatcgatatagaaagaaataagattaatgttgaatatgaaacacctactaatttaaatagtattgaaaaagaaatttatgacgctggatttaaagtactttcataataaaaagctttagtgtaacttaaataatttaaaataattttcaaatatagtagtaaagcatgactaattagggtagtatatcattgaaggtcaaaaaacgaggtgagataccatgaacaaatcagataagttacaaaatgtagtcaaattattatcatctttaggcgtcaatatcaaaaaaacaaaatctcgtttcgacattattaatactttgcctaccacaaaaaccgttactcaagaacttaaataatatgtgattgaaaaaagtctgagacattattagttttctcagacttttttatgtgttggagatacattgctgaagtggaacgataaagtcaaaatgagttttgtttcattctcattcatactattttcatgttattaactgaattaaaatatatttattattaagcatcttttgacgctggcttttgatggtaataaatagaaagtataacaccaatacctagcattaaactccataatgcgctaccaccataactaataaaaggtagtggtatacctgtaataggtaagagttgaatcgtcataccgatattttgcaaaatatggaagacgagtaaagaaatataaccaattaaaaataccttattaaatgatgaagttgtttttatagctaaacggataagatggaaaattaaagctaggaatataagaagtaatatcactgctccaataaatccaatttcttctccaatgacagaaaaaataaaatcggtatggttttctggaatgtatacttctccgtgattataacctttaccaaataattgaccggatcctatagcttttaacgattctgttaaatggtagccatctccattactataagcataaggattcaaccatgaattgattcgacccatttgatacattttgatatgtaacgttttctcaatcagagagggtttatatataatggctaaaataatactacttcctaatattgctacagtaataaagataggggcaagaatacgccatgtaatactactcactagcatgattccaacaataatggcacatagaaccaatgtagttcctaaatcattttgaagtaaaattaatatcataggtactagagatatgccaataattttaaaaaataagattaaatcagtacgaaaagatttattaaatgtaaatcgattatgattagaaacgattttagccaaggcaagtatcaaaataatcttcataaattctgaaggttgaatactaattggaccaaaagcataccaacttttagcgccattaataataggcgtaataggtgtttcaggaatgattaataaacctagtagtaagatacaaaagaagatataccatatatatgtattattttttatttttttgggagaaaaaatcatcacaataagtgctagtattgctcctaaaatataatagataatttgacgaataccaaaattggcactatattggccgccacccatagcagaactgattgtagtcacactaatgatggctaaaatcattattaatgctataagtatccagtcaatttttcgaagccaatgtgttgtaggctgttgacgggatgaatatttcataaaaaactccttaaattctatgggatagtatatatagattttacatgactttatatgattatgctacaaaatatagaagatgatataaagtcgaagcggtttaatctaaaaaataaccattaacatgagtggactattctttaagaaatttatatatttatttattggtaaatgcaaaaaatactgatactgtgataatatgaacttttagaaagaataatttaaattacatatcgttaatgaaacgtataattaacaatttaaacttaatacattatagtattataattatgatgagagaaacaaaagcgtaattaaacttcaatttataaatggcttttgtcattatttttctcgatggaggatataaagcatggtaaaagaaaatatttgtatcgtatatggtggtaaaagtgctgagcatgatgtatcaattttaacggcacaaaatgtattaaatgcgattaataaagacaagtatcttgtagatattatatatattacaaatgatggtcaatggaagaaaaaagaaaatattacaaaaaacattaaaactattgaagaattacatttagaagatataagtcctggagaaattacattacttttaaaagaaaatggggaaggaaataaatatgatgctattttcccattattacatggaccaaatggtgaagatggtaccattcaaggtttatttgaagtgctagatttgccatatgtaggaaatggtgtattagctgcatccagttcgatggataaattagtaatgaaacaattgtttgaacatcgcggtttacctcaactaccttatattagttttttaagaagtgaatatgaaaaatatgaaggtaatattattaaactcgttaatgataaattaacatacccagtatttgtaaaacctgctaaccttggctctagtgtgggtattagtaaatgtaataatgaagatgaacttaaaaaagggattgaagaagcatttcaatttgatcgtaagttagtgattgaacaaggtgttattgcacgtgaagtagaagttgcagttttaggtaatgactatcctgaaacaacatggcctggagaagtaattaaagatgttcagttttatgactataagtcaaaatataaagatggtaaaatcagtttacaaattccagcagaattagatgaagaggttcaaatgacgctacgtaatatggcattagaagcatttaaagctacagattgttctggattagtacgtgctgatttctttgtgacagaagataatcaaatctacattaatgaaacaaatgcgatgcctggttttacagcatttagcatgtatccaagtttatgggaaaatatgggattatcatactctgatttaatcactaaactaattgatttagctaaagaacgttacgaagataaaaagaaaaataaatatactatcgattaagcgaggagcctaagtatgattgaagtttcattaaaacaaatacaaaaatggatatcttgcgatattgatgaagcatatttagaacatcaaattaaaggagtcactatcgattctcgccatgtagaaaaagaaatgttatttgttccatttaaaggcgaaaatgtagacggtcatcgttttgtagaacaagcactaaaaagtggtgctggtgcttcattttatgaaaaaggacaggatattagcgattcaattcaaggacctattatatgggttgatgatacattaactgctttacaacaattagctaaagcgtacttaaagcatgttaatccaaaagtaattggagtgaccggttctaatggtaaaacaacaacaaaagatatgattgaaagtgtgttacataccgaatttagagtcaaaaaaacacaaggtaactataacaatgaaattggattacctttaaccattcttcaattagacaaagacacagaaatttctattttggaaatgggtatgtcaggattccacgaaattgaattgttatctaaaattgcggaacctgatattgcggttatcacaaatattggtgaatctcacatgcaagatttaggttctagagaaggtattgctaaagccaaatctgaaattactattggtcttaaatctgatggcacatttatatatgatggagatgaaccacttctaaagccccatgttgaaaatgtgaaaaatgcaaaacttgttagtgttggtttaaatcatgaaaatacattagtatgtaaagttgaaaatagtaaaaatgatggcatagcatttatgatcaataacaaggaacattatgaattaccaattttaggtattcacaacatgaaaaatgctactatcgctattgcaattggacatgaacttggtttagattacaacacaattcaaaagaatataagtaatgtacaactcacaggtatgcgtatggaacgacatgttactgataatcaaattacggttattaatgatgcttacaatgcaagtccaacaagtatgaaagcggctattgatacattaagtcatatgaatggacgtaaaatcattgtactcgctgattctttagaattaggtgaaaatagtcaacgtatgcatgaagatgtaggtacttatttggacaataaaggtattcatacgttacttacttacggtaatgatgctaagtttataagtcgtacaggtggccagtttgtggaagatgtagcttatttttcagataaaaatgaactgactcattacttaaagtctattttgcaacctgatgacaaagtgttaattaaagggtcacgtggtaataaacttgaagaagtagtaaatgctttaatttaattattcattataattaagagttgcttagaaatgaaaggtttcaaagcaacttctttttattattttaatagaacaaatactctacttaaaaacgttacttgctgtagatatgaaaattgctttattgctataactatttttaggtggtactatatagaagttgacgtaataagaagaccttatatacaaaaacgtatattgataaataaaagaattaaaaggagaattatattgcaaaattttaaagaattagggatttcggataaaacggtaaaaaccctagaagaaatgggttttaaagaaccaacaccgattcaaaaagaaagtatcccttatacattagaaggaaaagatatccttggacaagctcagacaggtacgggtaaaacaggagcttttggtattcctttaatagaaaaagttgttggaaaatcaggtgttcaagctttaattttagcacctacaagagaattagcaatgcaagttgctgaacaattacgcgaattcagtcgtggacaaaatattcaagttgttactgtctttggtggtatgccaattgatagacaaattaaagcgttaaaacgtgggcctcaaattgtagtaggaacgccaggacgtgttatcgatcatttgaatcgtcgtacattaaaaacgaatgatattcatactttaattttagatgaagcggacgaaatgatgaacatgggcttcattgatgatatgagatttattatggataaaatccctgctgaacaacgacaaacaatgctattttcagcgacaatgcctaaagctattcagacattagtacaacaatttatgaaatcaccacaaattgttaaaacgatgaacaatgaaatgtctgatcctcaaatcgacgaatactatacaattgttaaagagttagagaaatttgatacatttactaatttcttagatgtacatcaacctgagttagctattgtatttggtagaactaaacgtcgtgtagatgagttaacaagtgcattgcttacaaagggttacaaagcagaaggattacatggagacattacacaagccaaacgtttagaagtacttaaaaaattcaaaaacgatcaaattgatatattagttgccacagacgttgcagcacgtggtcttgatatttcaggtgtaagtcacgtatataactttgatatacctcaagatactgaaagttatacacatagaattggacgtacaggtcgtgcaggtaaagaaggtattgctgttacgtttgttaacccaattgagatggattacattcgtcaaattgaagaagtaaatgacagaagaatgaaagctttaagaccacctcatcgtaaagaagtgcttaaagcacgtgaagaagatattaaagacaaagttaaaaactggatgtcacgtgagagtgaagatcgtttaaaacgtatttctagtgaattattagaagaatatgatagcactgaattagtagcttcattattacaagaacttgtcgaagcaaacgatgaagttgaagttcaattaactttcgaaaagccacttgcaagaaagagtcgtaataataaaggtaatcaatcaagacgtggtggtaaacgaaacaataaatttaacaacaaaaataaacgatcaaaaggtaacttcaataagaaaaaaggtaaaaaacaagatcgtcgagatagacaagataaaagaaaaacatctatcaaaggtcgtacgtttgctgatttacaaaaatagttgttatagataagattaaatttgcttgattgagcttgagacatatgtttatgtctcaagctctttttgattataagttttacctattaaatttataaatgattgtactaataatgttttaaagaaaaagaggatagttgatcgtatttaaatagatagtattcagttttgttttttcattaacatctatcatattattttaaaaaaatagtatgatataatataaaaaaattgttaaggagtttattgtgcaattacatcactcttttcataaaagtcctaaatccgcatttttatatcattggttggtaagtggagtcacattactaatagagctcattattttaggtggtgggttgtattgttggaaagcatttcactggccccattttattttttatattctacttgtattaactatttgttcttttattcgttttattctacaacccatcaatagatactcttatagattttataatatagaaaataataacatagaaattttaaatacttttatttttaaaagctataaaacaacaaaaattgaaaggttacaacttttaaaggttaaaacaaatccgttattgaaaaagtttaatcttaagagagtcattgttgtgactgcaggtcatgaactcacaacaccttttgtttctaataaagaagcagaacgattaatattacatatcttatcacaaatgcgaggtagtaatgatgatatttaaacctcaaaaattacatccgatttcttatttcacaggtctaatagatgttataaagcaaaacatttttgttattatcgtgtttattggatttaatatatggaattttgattttacaaatattagacattatattggaccaggtatctttttattgattattcttttttctatgattaatcaatttcaaaaagtacgtctaacgcgttattggatagaaaatgatcaatttatagtcacatctggatggttaaataaaaaacgcaaagaattaaatttgaatcgaattcaatccttagataccacacaaggactgcttaatcaattagtaggtggcgtacgattacaaattaaaacgccgagtgatggtattgaacttgaaacgatttcgaaacaacaaagtgaattgattgaacgtacaattaaaaaaagacaacttcagttagacagtcaagaaatagagcctgataataagcctaataatagcgaacaagaattaatatctgaagatagtagtaataatgaagtaatatttaaaatgtctaataaactattgattttcatggcattgacaagtggcgtgataggtgtagcattcgccactatttcccccattataggtgcgtttgaagatgttatcccgtgggaaaaatggacgtctcgtctttttcaatggatacagtcagttacgtttctagtgactattattatattgactgtacttatattttgttatgttataggtactctaattgttgttctacgttattataactatacaatcacacaacgtgataatgagttaaaaattacttatggattactaaatgtaaaaaatatcacagtgcctattgaacgattacaagcagttgtagaaaaacagtcatttattagaaagttatttggatatacctctatatactttattattacaagtgatttagaagttaaatctaatgaagatgtaagtgaaaacggaaaaattatgattcttccatttattaataaaaaagaggcatattctattattagaaaattaattcctgaaatgcaatttaacgctatcactgaaaatgtaccaaaacgaggatatcatcgacatttttttatacctagtatcatattaattcttggtgcaactataggtgcttactattggagtatatggagttatataatagccataattattattatctttatggcaatttatgcgtatgtgtatatatctgcttctggattatgcaatagaaaaaatgaaattgcacttcgtcaagtaagtatgatgcatattaattcttattattttaaaaaggataaaattattggtatgaatgttaatcaaactccattgttagaaaagagccatttagcacatttacattttattatagctaagggtgcggtaaatgaagatattaagctaaaatatgcttctgaaaaacaggttcaattaaatattgagacctatttaggagggtctaagattgagtgaacatagttttatgaatacaagtggtctaaaggtgatgagaatcacatcattgataggccttataattattactgcttttttatttctactcaatatgatagatgtttattttactcatatatcaaaactttcaattaatatcattgtttctatagtaattatattgctttatattatactatgtattattgttattccgcttctgagatatcattatttcagttattactatgatgaaaacgagattcatattagaaaaggtatcatcattgttgaaacagatataataccgttttatagaatacaaaatatagaggtcatagaaggattcataatgagaaaatataaattagcacatcttcatttatctactgcaggtggagaatgcaatatagaactaattgcaaaaaaagaagcgatttatttaaaacaaatgattcaaaatagaaaacacgaactatataaataataaaggataattaagtgaggtgtagatatgatacatggtattggtattgatttaattgaaattgaccgaataaaagacgtgtatattaaacaaagtgataaattaatacatagaatactaacagatcaagaacagcaaaaatttcactcttttaaaaatgataaaagaaaattagaatttttagcaggacgatttgcaactaaagaagcatttagtaaagcattaggaacagggttaggaaaaacggtagcatttaatgatattgattgttataacgatgaaaaggggaaaccttgcatcgaatatcctggttttattgttcatgtctcgattacgcatacacaacattacgcaatgagtgaagtaatattagaaaaataaaccatatcaattttttataagtttaaataaggaggacttcatatgtcagatgttgcttatagaccgacatatttaaatgtagatcttgatgccattctatacaattataatatttttaaaacacttcaaagtgataagttagtgattcctgtaattaaagcgaatggatatggattaggaagtgtaaaaatagcagagattttagaaaataatagggctcaattttttgcagttgctactttagatgaagccattgaattacgcttacataatataaatgctaaattattagttttaggtgcgatatcaccgaaagatataaataaagcgattcaatatgacattactttaactgtaccttcacagttttggttagaacgagcgattcattatatagaagataactcagatcatgtatatcttcatgtgaaattagatacaggaatgggaagactagggattaaaacgcttgaagagtatcagttagtcattaatcttattaaagaacatccaactcttatttttgacggcgtctttactcactttgccaatgcagatgaacctggtgattcaatgaaacagcaatatgcattttttgaagagttggtaacaaaagcagagcgaccaaaatatatacatgctcaaaactcagcaggcgctttattagcaaattgtaaattatgcaatgcgttaagacttggaatttcactatatggttattatccttctgagtatgttagaaatgaagttgatgttcaattaaaaccaagtgctaaattaatgactcaagttgtccaaactaaatatttaaatcccggagactctgtaagttatggaagtacattcactgcaactgaaaaaatgaaaatagcggttttaccaattggatatgcagatggtttcttaagagctatgcaaggattcgccgtaaatgtcaatcaacatcaatgtgaaatcattggaagagtatgcatggatcaaatgattattagtgtaccagatgatgtgaaagaaggagatgaggttattttaatagataacaatttaaattcttcacaagcagtagaggcattagctataaaacaaaatacaattaattatgaagttttatgtaatttaggacgcagacttccaagaatatattatttaaataaaaaatttgaagttacaaatgaattattaaattagtatagtcacttgttacaaaatttgttattataaaactaaattaaagtttataatgtcttgtttgtatcaattggaggttcatagtatgttaacttttaatcagaatagaagccatagtcttgaacaatcactaaaagaaggctatgtccaaatggccgatttaaacctctccctagcaactgaagcatttccattagaatgtgaagcttgtgattgtaacgaatcatatcttacatctaattataaaagtgaatgattagaagaggcgatgtatatttagctgatttatcaccagttcaagggtctgaacaagggggagtaagacctgtagttatcattcaaaatgatactggtaataaatatagtcctacagtaatcgttgctgcgattactggtaggattaataaagcgaaaataccaacacatgtagaaatagaaaagaaaaaatatcgtttagataaagattcagtcattcttttagaacaaatacgaacattggataaaaaaagattgaaagagaaacttacatatttatcagaagataaaatgaaagaagttgacgatgcattggatatcagtttaggtttacacgatgtttgtcctcaaaaaaattagtattttatatgtataatccaaaaaatacgaaataaatttttgaaataaatcaattgtacttttgaaaagttttaattagactaatttcggtcgaattcaatgatactattgagtaagtttatgactatttagagatgtcgcagtagttaactgaattgaaaatatttaactcaagttttcaatttcaattaaccttgcgggggtaagacagcatattcacaaaatgaatactgtcttgctccctttttaagtagaagagttattttagaataatatacatttagcattaatgaataaatttaaaatgttgtattgtgtcagacaatatttaaacatgttttaatcagctatgaagtaaggaggcaaaattcgtggaagaatttaaaaaaaactataagcaacttatagatgagagtttggttactaaaaataaagaacaatttttaaagaagtgcgatgaattcactgaagaagtaatcaaaaaggatattctaccagaggatgttgttgatttacataaaacgtatattgcttctttaaatttaaaaacatctcaaatcttagatacattagatgtattagaagaagtagtaaaaggctttggatatagctatagagattatcaaaatttagttgataaaatgcaattccacgataaagaaattgacttagcctctagacttcaacaaacgatgttaaaaacagatattccacagtttgatagtatacaaataggtgttatttcagtagctgctcaaaaagtaagcggggactattttaatttaattgatcatagagatggtacgatgagttttgctgtagcagatgttatagggaaaggtattccagcagcattagcaatgagtatgattaaatttggaatggattcatatggtcattcacaattaccaagtgatggtttaaaacgactcaatcgtgtggtagaaaaaaatgttaatcaaaatatgttcgtcacgatgttttatggactatatgaagaaatgaatcatttattatattgtagttcagcaggtcatgaaccaggatacatttatagagctgaaactgaaacatttgaagaaattgaagttcgaggaagagtacttggtgtaagtcaacatacgcgatatagtcaacaagaaattccaatatatttagatgatttaattattatttttactgatggtgtaacagaagctagaaataaaaaaggggagtttattgcaaaagatactgttcttaatttaattagaaaatataagcatatgcatccccaagatattgttcaaatcttatatgaagccattttaaaaatacaaaatacgcaaaaaagagatgacatgacaattttaataataaaaagagtgaattaattatttaattttttgattatattataataataatgggtatagttgctatagtatacatatcgaaaaagattaggagtgtaagtaaatgaatcttaatatagaaacgataacccatggtgattattatgaagttattgttggtggagagttagacgtatatacagtacctgagttagaagaagtacttgtgcctatgcgccaagaaggaaatcatgacattcacgtgaacttagcaaatgtaagttatatggattcaacgggtttaggcttatttgtaggaacattaaaggctctaaatcaaaatgataaagaattatatattttaggtgtcacagatagaattagtagattatttgatattacgggtttaaaagatttaatgcacgttaatgaaggaacggaggtagagtaatttgtcactcaaaaatgattatattgaaatgaagttacctgcctcagcagaatatgtaagtttaattcgccttactttatcaggggtatttacaagagcaggtgcttcatacgatgacattgaagattcaaaaattgcagtaagtgaagcggttactaatgctgtcaaacatgcatataaacatagtgaacaaaatggtatgattaatatttgttttgaattatttgatgacaaaattaagattattatttcagatcaaggtgaaagttttgactacgaatctacaaaatcaaaattagggccttaccaagaaaacgaaaatatcgacttcttacgtgaaggtggactaggtctatttttgattgaatcattaatggatgaagtaaaagtttcaaaagagtctggtgtaacaattagtatgattaagtatataaaaaaagagcaggtgccaaataatgacgaaagagtcgaaatcagttaatgagatatcacctgaacaaattaaccaatggattaaagaacaccaagacaatataaatcctcatgcgcaagataaattagttaaacattatcgcaaactaattgaatcattagcatataagtattcaaaaggacaatcacatcatgaagatttagttcaagtgggtatggttggtttaataggtgctattaacagatttgatatatctttcgatcgcaaatttgaagcattcttagtgccaactgttattggtgagattaaaagatatttacgagataagacatggagcgttcatgttcctagaagaattaaagaaattggtccaagaataaaaaaagtgggcgatgaacttacgaatgaactcggacgttctccttcaattttagaaattgcgaaccgtttagaagtaaatgaagaagaagtgttagaagccatggaaatgggtcaaagctataacgcacttagtgtagatcattcaattgaagcagataaggatggttctacagttacattgttagatattatgggtcaacaagatgataattacgaccttactgaaaaacgaatgattcttgaacgtattttaccaatcttatctgatagagaaagagaaattattcaatgtactttcattgaaggattaagtcaaaaggaaactggtgaacgtattggacttagtcaaatgcatgtatctagattacaacgaactgcaatacgaaaattacaacaagctgctaggcaatgaaattgaggagcgaccaatgagttcatattgaattctatgtcgctccttttattgttagaaaatgtattgtaaaaataaagatatgttaaaattaaatagaatttatatacaaagagtggttataacatggaaaagacattaattaatgatattgtaaaaaaatatcaatttttagaaaaacaagtcatagctgtattaaatctattagaggaaaataacacagtaccttttattgcaagatatcgaaaagaagcaactggtggtttagatgaagttcaaattaaacaaatatctgatgaatatcaatatgtagcgcatcttcaaaaacgtaaagaagaagttatacataatattgaacaacaaggtttacttactaatgaattaaagcaagacattcttcagcaaacaaaattacaacgtgtagaagatttatatcgtccttttaaacaaaaaaagaaaactagagcaactgaagcaaaacgaaaaggattagcaccattagctcactttttaatagaaggacaaagtatgaatgtacatgaagaagctagaaaatatttaagtgaagaagttaaaacagttgatgaggcaattcaaggtgctcaagatattattgctgaacgtatttcggataatcctaagtatcgacaacgtttacttaaagacgtttattatcaaggaaagattgtgacaacaaagaaaaaacaagcaaatgatgaaaaagagatatttagtatgtattatgattattctgagcctataaaaagaatagctaatcaccgaattttagcaatgaatcgtggagaaaaagaaaaagtattgtcaattaaaattgaatttgatactacttcaatagaaacatttatacaatcgcaagaagtaaaaaaagctcatcaactagttgaatatattgagtctgcaattaaagacagtttaaaacgtttaatcatgccttcaattgaaagagaaattcgaaatgatttaactgaaaaagcagagcatcacgctatagaagtgtttagtgaaaatttaaaacatttattattacagcctcctatgaaaggtaaacaaattttaggtatcgatccagcatttagaactggatgcaaattagctgttatcaatccttttggaacatttattgctaaaagtgttatatatcctcatcctccaaaatctaaaatagaattggcagaaaaagaattagttagaatgataactgaaaataatgttgaattaattgcaattggtaatggtacagcaagtcgtgaaacagaacaatttgtagcaaatgtaataaaaaaatatcaactaaatgctcaatttattattgtaaatgaagcaggggcttctgtatattctgcctctgaaatagcaagaaatgaatttccagagtttcaagttgaagaacgaagtgcagtgtctattggtagacgtgtgcaagatccacttagtgaattagtaaaaattgatcctaaatctattggagtaggacagtatcaacatgatgtaaaccaaaaagaacttgaacaagcgctcacatttgtcgtagaaactgcagttaaccaagtaggtgtagatgtaaataccgcttcaaaatctttactgcaatatgtttcgggattatcaagtaccattgctcaaaatataattgattatcgtgaagaaaatggatccataaagcatcattctgaaataagcaaagtaaaacgtttaggtagtaaaacgtttgaacaaagtatcgggtttttaagaattgttaatggtaaagaaccattagataatacatctattcatccagaaagttatcaagcaacatatcagtttttagaaagtttacagctatcaattgatgatttaggttcagataaacttaaacaaacacttagtgatattaatattgaagaaaaatcaaatgaaattggaataggcaaaccaacactagaagatattgtaaaatctcttaaaacgccaaatcgtgatcctcgtgatagttacgaaactccacagttaaaatctgacatattatcaatcgaagacttgtctaaaggtatgaagttaagtggaacagttagaaatgtagtagattttggagcatttgtagatataggtgttaaacaagatggtttagttcacatttcaaaattatcaaagaaatatgttaaaaatcctatggatattattagtgtaggagatatagttgatgtttggattttaaatattgataaaaataaagaaaaagtatcattgactatgattaatcctaatgaataataaaatgcttcaaaagttagtggaaacaacttcgcttgatcattttaaccaaccttttaaacataaagcttattttaattctcgattacgaacaacaggcggacgatatgtattatctacacatcatattgagattaatccgaagcaattttcttgttttggaaaagatgctttaataaatatcataaagcatgaactatgtcattatcatttacatttatccggaaaaggttatcaacacaaggaccatgactttaaaatgttaagcaataaagttcaagctccaagattttgtcagccgattcaaagctatgaagaaagagcaaattatatatatcaatgttgtaaatgtaagactacgtatctaaggattagaaaagttaatattgataaaatgagatgtggtaaatgtggaagtaaattgaaattaaagatgtatttataaataaatttaaatatgaacaaataagatattactaatataacaatgtcctttaaaaacctacaatattgtaggtttttaaattttttaataaaaactattgacttatgttaaaaaagtatgtattatagttatcgttgtattaatgaatgaggtaaatattaaaaaatagtaaatttatttaaaataatattaaaaacttattgactttttattacaaatcatttacaataaataatgttctcgataattaataaattattgcgttttgccagcggtcgtggcggaatggcagacgcgctaggttgagggcctagtgggagaaatcccgtggaggttcaagtcctctcggccgcaccaaatcaatttcaattattatatactgcgggtgtagtttaatggcaaaacctcagccttccaagctgatgttgtgggttcgattcccatcacccgctccattacaaatttcaaatgaacattgaaaactgaatgacaatatgtcaacgttaattccaataaagtaacttaaatgttacaaacactatttagtattatgagctaatcaaacatcataaatttttatggagagtttgatcnnnnnnnnnnnnnnnnnnnnnnnnnnnnnnnnnnnnnnnnnnnnnnnnnnnnnnnnnnnnnnnnnnnnnnnnnnnnnnnnnnnnnnnnnnnnnnnnnnnngaggtggaagcgtggtgacacgtggagctgacgaatactaatcgatcgaagacttaatcaattttttcaagttttgcgacgcaaatctttacttactatctagttttgaatgtataatcattcacttgtctggtgacaatggcaaggaggtcacacctgttcccatgccgaacacagaagttaagctccttagcgccgatggtagttggactgacgttccgctagagtaggacgttgccaggcaaatcattgtatggatgcgatgacccgattttgagactgtgaggtctcttttttttatgtcgaaatttatagaaagtgtttggagctaatgaattgagaagtggaagtattaaactaaaaaaataataaaacttcttcaataatatactgaagaagtttttaatattatctcaaattaataatgaatacaacattttattttcattaatataaatatttgatggatcaaattcatcgacattatgttttaattgttctaaatcttgatgattatttaactgaatgccaataataacagtaccagtattttgagaagctttttttagatattcaaatttagtaatatcatcttgaggacctaaaacatcattaacaaattcttttaaagctcctggacgttgagggaagtttaaaatgaaataatgtttcatttcttcatataaaagtgaacgttcttcaatttctttcatacgattaatatcattatttccaccactgactacgcatactacagtttttcctataatattgtctttataaaattcaagagctgatacacttaatgcacctgctggttctgctactattgcttgtttagagtacatatctaaaattgtagaacatactgcatcttcatcaatttgtaagtagtcgttgacgtattgtttgacaatattaaaggtaatatcaccaacacgggctactgaagcgccatcaacaaatttatctatatgttctaaagttacaactttattttgaactactacagattcatacatactacttgctccggcaggttcgacgccaatgatttgtgtatgtggactatgttcatgcatatatgtacttacaccggatattagacctccgcctccaatagctgcaaagagataatcaaattgaatcatttctttttttgcttctaataaaatttcttttgctaatgtcccttgaccagcgatagtataaatattgttgaatggatcaataaatgtcatatgatgctcatctgtataaactaaagcttcttttaaacaatcatcaaatgtatcaccagttagaacgatttctacattttctgcaccaaagaatttaacttgatttactttttgaagaggagttgtcactggcataaagataacagcttttaaatttaatgctttagcagtataagctactccttgggcatgattaccagcgcttgcgcaagtaataccttttgatttagcttgtgtgtctaatactgaaatagcgttataagcaccacgcaatttaaatgagcgtacccattgcaagtcttctctttttaaataaacattacaattatatttttgtgaaagataatgatcatattgtaatggtgtttctttcaccacatcttttatacgtaaataagcttcgtctacatcagtagctgttaccgttgtctttaaaaccatttgttatcatccttacattgttttctcatatttctctattaattcttcatattttaatgtaatagcaatatcatctaatccatttataagtttatctttccaagtttcatctatatcaaagtggaaagattgattatttgcggacacagtttgatttggtaaatcaactgttatattattttgattggctagatattttctagattgttcatttaaaacaataggtaacattccattttttgtacaattcatatagaagatatcgctaaaaccaccagcaataataatattaaagccaaaatcttttaaagcccaagcagcatgttcacgacttgaaccacaaccaaagttgtctccagtaataagaattgaagcacctttatattttggtttgtttagattaaaatctgggttatctgatccatcaggtaaataacgccattcatcaaaagcaaagggtccaaaaccagttttagtaattcgtttaagatgaacttttggaataatttgatctgtatcaatattatcgttaaacaaagggactactttacctgtgtattgggtgataggctgaatatccattacttatacaaccacctttcttacgtcaacgaatttaccatttattgctgcggctgctgccatggctggagaaacaagatgtgtacgtgcacctttaccttgccgaccctcaaaatttcgattacttgttgaggcacaatggacaccttctggtacttggtcaggattcattcctaagcacatggaacatccaggttctctccattcaaagcctgcttctttaaatactttgtctaatccaagagattctgcttctttttttactgtacgtgagccaggaacaacaatagcagtaattttaggatgtactttttttccttttacgatatggcttgcttctatcaaatctgataggcgagcattagtacatgaacctaaaaagacataacctaaatcgatatcttctgctttttgaccaggtttcagtcccatatagttgtatgcccgttcatcattaatattttgaatttctgggaatggagaactaaaatttacacccatctctggatttgtgccccatgtcacttgaggttctaaatttgttacatcaagtgtaatcactttgtcaaaatgagcgttttcatctgaatatagtttctgccattctccaatagattgattaaaattttgtgcatatggacgacctttgatatattcaaatgtagtttcatctggttgaataataccgtatttagctccaccttcaatggccatgttacaaattgtcattcgaccctccatggatagtgattgaattgtttctccagtaaactcaagtgcatagcctgttccgaaatctacaccatattgattgattaaatgtaaaataatatctttagcatacacaccaggttgtaatttaccagaaacttcaattttaagatttttaggttttgtttgccataatgtttgagttgcaaaaacatgttctacttcacttgttccaatgccaaaagcaatagcaccaaatgccccgtgagttgctgtatgtgagtcaccacatacgattgtcttacctggttgtgttaatccagtttcagggcctaccatatgaacgataccctgctcatcggaacccatatcaaaaatatgtaccccaaaatctttggcatttttctgtaaggttgtaatctgtttattagcaatttcatctctaatattaaatatatcgattgtaggaacattatgatcaagagttgcaaaggttaaatctggacgtctaagttgtcttttttgaagtcttaatccttcaaaagcttgaggagaggtcacttcatgtataagatgcaaatctatgtataagagttgaggttcgccttctttaccagttaagacatgtttattccaaactttatcaaataatgtttgagccattatttatgtacctccctttattgataactttttttaagtaactcaaagatttctgaagttttatagtgtcctccaaggtcttttgttgttttaccaattttaattaaatgatatacagcatcttctaattcttctgctgctacactttgatttaaactttctcttaaacacattgctagtgacaataccattccaaatggattagcaagattttgattagcaatgtcaggcgctgagccatgaataggttcataaagtctagtaccatgttcactaaaacttgccgaaggggataaaccaagtgaaccaggtattactgaagcttcatcacttaaaatatcaccaaagagattttcagtaacaatgacgtcgaattgtgaaggatgagtaatcaaatgcatactacacgcatcaacgagtaaatgatttaattcgatgtccggataagacttgcttacttcagtaacagtttttctccaaagtttacttgaagcaaggacattctctttatctacagaagttacttttttattacgagtacgtgctaattcaaatgcaactttagcaatacgttctatttcagctttagtataaataagagaatctaatgcttcagaatgattaatatgtctaggttcaccaaaataaatgccactcgttaattcacgaactataactaggtctgtatgtttaacacgcgcttcttttaaaggtgaaaattgactggtaccttcagtcactttagtaggacgaatattagcaaataagcctaactttttacgtaacgctaataatccttgttctggacgattattaggatctgtccattttggtcctccaactgctcctaataaaatcgcatctgcttcttgacaggcagagagtgtttcattaggaaggggagtgccatgtgtatcaatggcggctcctccaaaatcataactttttaaattataggtgaaattgtatttcttacttattatttctaatagttccaaacttccatttaaaatttcaggaccgatgccatctccgggtaaagcaacaattttatatgtcattatttattacctactttctctaaatcttgggcaatatatttagcatgagcttccacatatgctttacaagaagcttgaagtatatcatgatcgatacctatgccattaacatgttgattttcaataacaagctcaacatgaacctcagcttgtgcatctgtaccttcagtaactgaatcaattctataatcgattagttcactatcctttttaaaaatacgatcaacagcattgtaaattgcaacaattgatcctgtaccaatgcttgagtcttgataaatatgaccttttttatctttaatgacaacaacagcactttgtagaccatttgaaacgtattgtaattgtaaagtttctacttgataaattgcattttgttcatgttcagaaccttgaatcatcgcatgaatatctcgatcagatactgattttttcttatctgctactgctttaaattgtttgaataactcgatttgttgtttaggttcaatgtcataacctaacgttttaagtttttcagcaaaagcatgtttaccagaaagtttgcctaaaggtaattcatttttacttattccaacaagttgaggcgtcatgatttcgtacgtttcaggatttttaagaacaccatcttgatgaatacctgattcatgactgaaagcattttgaccaacaattgctttatttcttggaactcgaatgcctgcatatctagaaattaattctgaagtcaatttagtttgctctaattttaattttgtttcaataccataatgatctttgcgaacgtatagtgctaatgcaatttcttctaatgcagtattacctgcacgttcaccaataccatttacagtaccttcaatgcgtttcgcaccattttcaattgcagctaagctatttgctactgccatacccaaatcatcatgacaatgtgcactataaataatttctttttctgatttaacatttgtaataagagatttaaaaatggcaccatattcacttggatagctatatccaacagtatctggaatattgattattgtagctccagcatcaacagctgtttgaacagattttataaggaatgcttgatctgttcttgatgcatcttctggtgagaattgtactacatcgaataatgatttagcataactgacatgttctttaattgattctaagacttcttcttgagtcatttttagcttatgctctaaatggataggggaagtagcaataaatacatgaacacgtggtttagtagcacattttgttgcttcatatactgcatcaatatcagattttttacatcttgctaatccacacactgcagtggtagttaatgctttagagattgcttctactgatttaaagcttccagtacttgaagcggggaagcctgcttcaataacatcgactccccatttttcaagttgcttagcaatacttaaacgttcatcaaatgaaaaattcacaccaggtgtttgctctccatctcttaacgttgtatcaaatatttgaatatggctttccatttttaacatctccttacattttatttttgaatgcttttagatttaatgaatggcatcatttttcttagttcacgacccactgcttcaatttcatgaccgtgttgttgttcacgcaattcataaaattctttaaatccattttcgttatctttaacaaagcgattagcgaaattaccattttgaatatctttaagtacttctttcatattgtctttaacatctggagtaatgacacgtggaccagatacgtagtcaccaaattcagcagtatttgaaattgaataacgtacattttccataccgccttcatacattaaatcaacgataagtttcatttcatgtagtacttcaaaatatgctaattctttttgatatccagcttccactaatgtctcgaaaccactttgaatcagtttatgaattcccccacaaagtacagcttgttcaccgaataagtcagtttcagtttcctctttaaatgttgtttcaataacaccagcacgtgtagcaccaataccttttgcataacttaaagcaatgtcacgtgcatgacctgtagcatcttgttgaacaccaaataatgctggcacagctgaaccttcaacaaatgtacgtcttactagatgaccaggacctttaggtgctactaagaagacatctacatctttaggtggttcgatgacgttaaaatgaatattaaatccatgtgcaaaagctaatgcattaccagcttctaaatttggagcaatttcatttttatatacattaccttgaatttcatcaggaagtaataccataataacgtctgcttgtttaactgcttcagccactggataaacatctaatccatcttctttagctttattaaatgaattacctggacgaataccaactcttacgtcgtaaccgttatctttaaggttttgagcatgtgcatggccttgagaaccgtaaccgataatagcgatttttttaccttgtagtgcatctttttctactgattgatcataataaacttttgtcataatactttcctccattagttaaaaaatttaaaaaattccgaatattgaaaaggtaataattaacttcatgatgttagacattaaatatgataattgatgtaaaatgctagcgcatcatctaagaattaatcattcacatcttcaatattaataacactgacttgtttttttaatttagtaattaaaattcgatatacatcttcatcctcaatatgaactttgattgtcatatcagatatgccatcttcactagcaggttttacatataattcattgatattgtactgtaatcttacaaaagcacttgtgattcgatttaacgtactgacttggtcagctacttttaattttaaagttcggttcattctagaccctccatttcatgattagctttaccactaggaatcatagggtttacaggttccgctggagaaattcttacttcaattaaagcaggaccttcataattaaaagcttcatctaattgcgcttttaatttattaggatgatcgattaagaagcttttaacaccgtaagcttcagccattttaataaaatctggttgatcattaaaaacagaatgtgaaaaacgttgattaaagaatttatcttgccattgttttaccattcctaatgtaccattgttaattaaaataatttttacatttaggtgatattcaggtaataacgccatttcttgattggtcatttggaatccaccatcacctacaaaacaaacaactgttttatctggagctgcgagttgtgcaccaattgctgaaggaataccgaatcccattgttcctaatccaccacttgtaacccattgactatgatgtttaaaaggataaaattgtgctgaccacatttgatgttgacctacatctgtagtgacgatggcttcaccatttgtgattttaccaatatattcaatggcttcttgtggacgacaaaatgtatcattagcttctttgtatttaaatggatgttttgatttattatctaaacaatggtctacccattctttgtatgtagcatgactttgatgttcagtaactaatgcttctaatacttttttacaatctgcaacaattccgagtgttgtaggaatcactttattaatttctgattcatcaatatcaatgtgtactactttagcgttgggtgcgaattcgttaggattactagccaaacgatcatcaaatcgactacctaaattaatgagtaagtcacattcagtgagtgccatgttacttgcataagagccatgcataccgcccataccaaggaaaaggggattttcatatgaaatagcacctagacctaataaagttgtaacaacaggaatttgatgttgagtaacaaattcagttaataaagcatttgattttgagtgattgatacctgctccagctaaaacgacaggtttttttgcatgatttaaatattgagaaagttgttgaatatcttctttatttggattttcagttacttgatatgaaggtaaatgaacctcttcttcaagtggagcagaagaagttaaaacacccatatcttttgggaaatcaatgactacaggtcctttacgtccagtatttgctaaataaaatgcttcgtgaacaattctagggatatcatctacatgtttaacttggtaattagcttttgtaattggcgttgtcattgataataaatcagcttcttggaatgcatctttaccaataccaggggttgccacttgtccggtaaatacgactaagggtagagaatcacaataagcatcagtaataccagtgatagcatttgtagctccaggaccacttgttacgacgacgacacctggtttgcctgaaacacgtgcgtatccttcagcggcatgggtagcaccttgttcatgacgtgcaagaatatgtttaattttttcatcataaaatgtatcgtataatggtaaaactgcgccacctggatatccaaaaatgaaatcaacatcttcgtgtacaagtgcttctactaataagtcagaaccgcttcgagttgtaagtgtttcagtttgtttattactttcctttgtttttgacatatttatcgctccttaaatttaaataagattttctgggacttgcataataccacccgtatttgcactggttactaaagcagtgtatcttgcaagataacctgtttttactttagctttaaaaggctcaagttcttctttacgtttatacaattcttcttgaggctgattaacgtctaaagttcgatttactaagtcaatagtaatttcatcaccatctctaatcagaccaataggacctcctgaggctgcttctggtgaaatatgacctacagcgataccacgagtggctccagaaaaacgaccatccgtaattaaagcaacatcttttcctaaacctcttccgacgatagatgatgtaggagctaacatttctggcatacccggacctcctttaggtccttcatatcgaatgacaactacgtgaccttcacgaactgttttattatcaattgcttctacagctgcatcgtgtgaatcaaagcaaattgcttttcctttaaatactttaattgaaggatcaacaccaccaactttaattactgcacctttaggagcaatattaccgaataagacggacaatccgccttctttatcatatggagcatctaaagaatgaataacatcgaaatttttaatctctttaccttggttattttctcttaatgttttaccagtaactgttagtcgatctggatgtagggttccttcttttttcattaattcattaatgattgctggacatccgccagcttcatgaacatcgtgcatagaataagaagaacttggtgcaatcttagataaataaggcgtttttttagcaatttcattaattctttctaagtcatattcaattccagcttcattagcaattgctaatgtatgaagtacagtatttgttgaaccacccattgccatatctaaagcaaatgcatcatcaattgcttctttcgtaacaatatcacgaggtttaatgtcattttttatattttctaccaattgaaatgctgcttgtctaatcatttcacgacgttgatcgcttactgctaaagctgtaccgttgtagggaagtgctaatcctaagacttccattaaacaattcatagaatttgctgtgaacattcctgcacatgatccacatgttggacaagcattttgttccatatctaaaaattcttctttagtaattgaaccttctttaaaagctccgactgcttcgaacatagacgataaagttaaagcttttccttgagcagataaaccagctttcattggaccacctgaacaaaagatagcagggacattcgttctaacagctgctaataacattccaggtgtaattttgtcacagttaggaatataaaatacaccatcaaaccaatgagcattgataacagtttcagccgcatctgcaataatttcacgtgacggtaaggaatacctcataccaatatgtcccattgctattccatcatcgacaccaattgtattaaattcaaaaggaattgcacctgcttcacgaatcgcttcttttgcaatatctgctaattctcttaaatgaacatgtccaggaacgatatcgatatatgaattacaaattgctacaaaaggcttattcatgtcagtaggacttttaagtgctcctgtcgcgtgtaataggcttcttgctggtgcttgatgatcacctttttttatcatgtcacttctcatttattcattcccccataaattactaattattaaaataaaaaaacgccccaataaagttgggacgtttttaagtcccattcaatgagaaataggacttaaacatttagtaaattaagctactaaagttccagccctgaagagtataataaaataattaaattttctagtggtgacagtgaatatgtaaatgattgcatggtattatactcctttcttgaatgggtgattatttgaatagttagaattgtataaaaatttgataaatttaatttacactaaacagatattaaagtcaatactctttttagaattttctaacaatttagaggaatgatttatattttattaatgagaaatttttagtaaagtttgttacaattattaagttaaatttagatgaaataacgaagtgtaaaataaacatgaggagagagaacaatacatgatacctatcaaaaatttagatgagatggaacattttgctaaaattttaatgaagcatgttggttcaaaagatgtcattttattgaatggagatttaggtgctggtaaaacaacgttgactcaatttataggtaaatatctaggagtaaagcgtaatattaattctcctacgtttaatatcataaaatcatacaaaggtaaggagttaaaacttcatcatatggattgttatcgcttagaagattcagatgaagatttaggatttaatgaatactttgaagatgacgctgttacaataattgaatggagtcaatttatacaggagttccttccggaagagtatttagtgattaatattacgactataaatgaaaatcaacgacaaattaatatagcagcaaaaggctatcattatactaaaataaaggaagagatagacaatgaacttactgttaattgatacttcaaatcaacccatgtcaattgctttgatgaacgatgatgaggttttagcaataaaaacaacaaatagtaaaaaagatcattcgagccaacttatgcctagtattcaatccttatttaatgaatcgaatttaaaaaaacaagaattagatgggattgttattgcaaaagggcctggctcttatacaggagtgagaataggcgttactgtagcgaaaacattagcctatgctttgaatactaaattatatggtgtatcatcgttaaaagcattagcggctactatagatacgaatgataaaagaattatcgtaccaatatttgatgctcgtcgcgaagcggtatatacaggattatatcaatatgaaaacaatcaattaaatacaattgaaaaagaccaatatatttctttagaagcgttgcataaaaaactcaatgatttaaatcaaccttatgtgtttgtaggagaggacacggaaaaattatctgaattactacttggagatattgaagctaaactgcctaatgcaactgtcatgaaacacttgattcatcaacctgagaacattcatacgtttgtaccaaattatataaaattgtcagaggcggaacgtaattggttaaaccaacagaagaacagttaaccattagagcgatgcaagtcgatgatgtaccaagtgttttcgatattgagagagaaagcttcaacgatagttcatggaccattgatgcattttaccatgaactaaatgaaaataacttcgcaaaatactttgttgttatttttcaagaagaaattattggatatttaggattatggatagtaatagatcaagctcaaattacaacaatagcaatcaaagaatcattcagagactatggattaggtcagctattacttaattatgtgatggactatgctaggcatacttgtgatgtgatgagtttagaagtgagaattacgaatgtgatagctcaacatgtatataaaaaattagggtttcaatatggcggtaaaagaaaaaattactatggagaaggcgaggatgcattagtgatgtgggtgaatttaaatgaatagagacatattaatattagcggttgaaacaagctgtgacgaaacaagtgtaagtgttataaaaaatggaaatacgattttatctaatattgtacttagtcaaatagaaagtcataaacgttttgggggagtagtccctgaagttgcaagtagacatcatgtagagggaattacgactacaattgatgaagcgttatcttcagctaatgttactatggaagatatcgatgccatagctgttacacaaggacctggattaataggggcacttctaataggaattaatgcagcaaaagctttagcatttgcttataataagccagtcattcctattcatcatattgcaggacatatttatgctaatcatcttgaagaaccgttagtctttcctttaatagcattaattgtttcgggtggacatacagaactcgtttatatgaaatcacatttaaattttgaagtaattggtgaaacacgagatgatgctgtaggagaggcttatgataaggtagcaagaacaattggtttatcatatccaggaggcccagctatagatgcacttgctttggaaggaaaggacacataccattttcctagagtatggcttgaaaaagatagttatgattttagttttagtggattaaaaagtgcagtgattaataagttacacaatcaacgacaaaaaaatgaagacataaaaaaagaagatgttgctaccagtttccaaaatagtgttgtcgatgtattaagtacaaaggctattaatgcttgtaaagcttatcatgttgaacaccttattgtagctggcggagtagctagtaacaaaggattaagagaacgattaaatcatttgtgtaaagaaaataacattaaactttcaatacctaattcaaagttatgtacagataatgctgctatgattggtgctgctggatattattactataaagctggtgtaacttcatctttagatttaaatggaaaaaataatatagatattgaagatgtaacagttgaataataaagtaaaaagtaattgaacttaaaatcaaataagtttcaattacttttttatttaattaggttaatatattgacttatgatatatgtcaatagagaacgtgtgtacttatcaacaaatagttaatatcttgtggataaaaagggggcaaagatgtgaatatagtttaaatgttgtgtaaaagttatgtgaattattatcgttcgcgttgtggataactaggataagttcgttgataactgagatatcagtattttagttgtttataaatttgtgaatgaaataaataaaaaactagtaaaaatttgatacttttactagttttcttagatgtattaaattttttcttgtaattcttcccattcagccataacattctctaattgttgttcgatacttaatttctgctcagcaagttcatttgccttaataggatcattaaaaatatcaggctgagtcaattgttgatcaatttgagtaatgtgttcttcatatttttcgatttgttcttcacattgctcaatttgacgctcaatttttcgtaattctctcttatattgtttttgagaagcatatgtattagtcgttgacgaatcggtgtcttctaaatcaagcgtttcatctttattgttttccgcttcaaattcctttaacgcagaagcttcttctgttttctcaataaaatattgatagtcacctaaatacagttgaccgccatctttatttaaatcaaatactttatttgctagttgattaataaaatatcgatcatgggaaacaaataaaattgtaccttcaaaatcttttaacgcttgttctaacatttctttagaatctatatcaagatggttagtaggttcatcgagtatcaaaacgttatcacgttgtaacataagtaaagctaattgcaaacgtgctttttcgccccctgataaatcattaataacttttttgacgtcatcttgaacgaataaaaatcgtcctaaaacagcgcggacatctttttcattcatcataggatattgatcccaaacataatctaatattgttttattagatttgaattctgcttgtttttgatcgtaatatcctatgtttaaattagcaccataagtaatttctccacctaatgctttttgacgatttgcaattgttttgataagggtagtctttccaactccattaggcccaataatagcaatatggtctccttttgtaacttcaatattaataggagcagtgataggggattgataacctacttctagattacggatatgcatcacatcattgccagtatttctatcaaacccaaactggatattagcacttttagcatccatcattggcttatcgatacgttccattttttctaatgtttttcgacgacttttagccataccgcttgttgaagcccgagtaatatttttttccacgaaagtttcaagacgtttaatttcttcttgttgtttttcatattcttgcattcttaattcatagtatttatcacgttgagtaataaattgctcataattacctacgtaacgcttcacatttcctaaagcaacgtcatatatttgagttacaattttatctaagaagtatctgtcatgactaataataatgatggcacctttaaaatatttcaaataatcttctaaccacttagttgtttccaagtcgaggtggtttgtaggttcatctaatagtaataaatctggctcacttaaaagcatttgtgctaaagataaacgtgttttttgtccaccactaaaatcattaatgggtttatcaaattcttcttcagtaaagtttaaaccatgcaatactgttttaattttactttcatattgataaccttcaagttgttcaaattgattagataatgattcataacgctccatatgttgtttataatcttctgaatcataactatcaacgtgagcggctaaccaatcagtttcatcattaataagcgtttccatatgcttaatatgttcaaatggttttgacatttcttcaattacagtaagagaagaatcaagtgtcatttgttgagttaaataaccaatacgtaaattcttgatttttgaaatatggccactatcataatcttcaacacctgcaataatcttcattaacgttgattttccagcgccatttcttcctactacgccaatacgttctccagttttaacttcaaaattaacatgattaaatatatcttcaccatcaaacgattttgaaatatcatttaattgtaaaagtatcattcaagtttcacctttctatctatgtaacaatcacatttatttaactttaaatttgacattattatatcattttacaatataaggtatgcttaggaaactaagatatttatttttgaaataggttacggtataatattgcagtatccataataggcattatatatatttcactaaaataactaattgcactctagttagtttgaatatatagattaaaaagttcaaacaaaaagggggacattgcatatgcctcaaaatcaatcaaaaatacctcgcgctacattaaaacgtttacctttatattatcgatttgttaattcattaaaaattaaaggtattgatcgcgtgagttctaaaacaattagtgaggctttagatattgaatcagctacgataagaagagatttttcttattttggtgagttaggtaagaaaggatatggctataacgttgagagtcttttagaattctttaaaacggagattagcgatagtaataatattcacattgctattgttggcgtagggaatttaggacgtgcattacttacttacaatttttcaatacatgatgaaatgacaattacagctgcatttgatattgataaagatattgttggtacaacagttggaaaagtgacagtaaagcatattgatgatatttcatctgaacttcaaaaacagaatattaatgtagtgattcttactacaccaggaagtgtggcacaatctgtttcagatcgacttattaaggcagatgtaaaaggtatcttaaactttactcctgctagaattgatgtgccaaatgatgttcaagttcatcatatcgatttaggtatcgaattacaatcactattattctttatgaaaaactcttcaaattaatattaaattattttttaaagctacaatgcatttgcattatagctttttttataaatatattaattcaatggaaaatattgaaataggttagttaatccattataataccttagtaaatcaatcgggaaagggtgttttatttgatttggatgattattagtggattaatcgttggcctattattaggttttgttatgcaacgtacacgtttttgtcttactggcggatttagagatatgtatgttcaaaaaaataataaaatgttttatgctttgttagtggcaattacagtacaaagtataggcttactagttttaactggttttgatgtattaacagtttcttatcaaacatttccagtaatgggtacgattattggttcatttgtgtttggtattggtatagtattagctggcggatgtgcaactggcacatggtatcgagctggggaaggattaattggtagttgggttgctttaattatgtatgctttatcagcaacaattaccaaagctggaattctattacctttaatgaataaaattaataaaccaacgaatgtaaatgctagtatgtcacaaacgacaggcataccaagttggatattagttattatattaacaggtgtaacattattcttagttatccgtacattacgtaaaccaaaacccaaaattgctgtacccaaattaaagcaaagatattcaggaatacgacattatttatttgaaaagcgctatcatccatttgtagctggaattattgtaggattgattgctttattagcatggcctatgagttattctactggacgtgaagatggattaggtatcactactccatcagcacatattgttcaattcttaatgagtggagatttaaaatttatcgattggggcgtttttttagtattaggtatatttattggatcatatattgctgctagaggagcaaaagaatttaaatggcgtttaccagataaaattactattagaaatagtgctattggtggtatatgcatgggatttggtgcttcagttgctggcggttgttccattggtaatggattagtggcgactgcaacactaagttggcaaggttggattgctttagcatcgatgatattaggtacatggtttatgagttactttattttcgtaagaccaatgaaacaaattcaaaaacaaacagctcaatctactcaaatatctaaacaaactcaaacaacttaattattggaggactgaatatgttatacgaattaggaactgttggaatggtatgtccatttccacttattgaagcacaaaagaaaatggaaacattaaaaaatggtgacgaattaaaaatagactttgattgcactcaagcaactgaagcaattccaaactgggcagcagaacaggggtatcctgtaacaaactatgaacaacttgatgatgcttcatggacaatcacagttcaaaaagcttaagtttttctttataaatgtaatgtaatatgacaaattgtgtcatttaatcttacgtgtttttgctattcttaaaaactattaatatgatgttttttaaggaagtggtaaaaatgaagatggatgacacaatttttttatttctgtgtattttattagtttggttaatgacaccgggattgagtttattttatggaggcttagttcaatctaaaaatgttttaaatacagtgatgcaaagtatggccgctatcattattgttacgtttacatgggtggtcattgggttttctcttagttttggtcatggaaatgattggataggtaattttgattttattggtttgcaacatgtaggatttaatacgaatgttcaatttagtccacatattccgtttgccttatttatgttatttcagatgatgttttgtaccattgcggtttccattttatcaggttcaattgctgagcgaatgagatttattccttttaccatttttatatttatatgggtaattatgatttacagtcctgtagcccattgggtatggggcggtggttggattcaacaacttgaggctttagattatgctggaggtactgtggtacatattacatcaggagtatcaggattagtattagcaataatgataggtcacggaaaaaaagtagagaaactacagccgaataatttacttattacacttataggtggtatttttgtttggataggatggtacggttttaatacaggaagtgcgtttactttaaatgatatagcagtgatatcatttgtaaatactatcatcgctgcaagcggaggagcatttagctggttgattcttgaatacttttctaataaaaagttaagcttacttggtttattatcaggtgtactgtcaggactcgtaaccattacaccagcagctggatttgtaaactacttaagtgcatacattatctctatgattggtggtatagcatgttattttgtggtcaattctataaaagaaaaattaagatataatgatacacttgatgcctttggtattcatggtgttgggggtgtgattggtgcaatattgactggtgtatttcaatcacataaagttaataaagatatattagatggattaatctatactggtcatttacatactatatggatacaatgtattgcagttgtagtagtagtcgtttactcgattattataacttttattattggaaagacattatcaatttttatgtcccttgctacgaccgttgaagaagatatgacaggtttagatcaacttgtgcatggtgaaaaggcatatttttatggggaattaaataaattacataaaaggtattgatatatatttaaaatgttaaagtttcattagtaaaacagtatttgaagataatcacgatatgataaaattaatattatattaatattaatttagatgattagtctattgaaaaacatatcagatattgcaaagtttgcgggagtatcaaaagtacaatttcccgctttttaaattatagattgtaaagtcttaagactaattaccgttacgatattaagtgataaaattaatactaatgatttaggaggactaatatgactgagtggtcaagagaacaacgctatcgtcgtattgaagatgtgaacaaagatgaattagaagcgttaaagcatcgaatagaacaatcaagttatcgtcaacactttcatattcaacctgaaacaggtttattaaatgatcctaatggattgatgttttataacggaacatactatgtatctcaccagtggtttccattgggtgctgtgcatggactgaaatattggtttaattatactagtaaagatttagtgacatttgaaccaaatggtcctatattaaagcctgatacgatttatgatagtcatggggtatatagtggaagtgcttttgaatttgaaggaaacttatattacatgtatacaggtaatcatcgagataaagaatggaaaagatattcgagtcaaatgattgcaaaagtaaaacaagatggttcaatcgaaaaattaaataagcctgtgattgctcatcaacctgaaggatatacaagtcattttagagatccaaaagtatttaaacatcatgaagaatattatgcaatattaggtgtccaaactcaacaagaattaggacgtttacttttgtacaaaatgatacatcgacagattgaccaatgggaatatattggaggaattacaaccgaactagaagattttggctatatgtgggaatgtccagactattttagtttaaatggacaagatgtcattatttttagtcctcaaggtattgatgcaaaagaagaaaaatatagaaatatttatcaatctggatatctaatcggtcatttaaatttcgatacattagaattcaaacatgatacatttatagaacttgataatggttttgatttttatgcgccacaaacgtttatagatgaatatggtaagcgtattttaattgggtggatgggattaccagatactcactatcctacagatgaagaagattgggcacattgtttaacgatacctagagagttaacaatcgaagaaggacggttacgccaacgtcctttgaaagcgttagagacgttacgtcaaaataaagaaacagcattaggttatgctaacaaatataatacaacacttcatccttacgaaggtacgcaatatgagcttattattgatattttagaaaatgaagcaacagaaatatattttgaattaagagcatctaagttaaattcaacattaatttcttataatactagggagcaaaagattacattagatcgatcagaaagtggtgcattacctagtaatgttgaaggtgtgacaagatctacatatttagattcgccattaaagcaattacacatttttgtggatacgtcaagtattgaaattttttgtaatgatggagagtgtgtcttaacgtcaagaatttttcctgatgaaaatgctacagcaattcgcacatctacagaaacaggtcaagtttatttaaaatttactaaatatgacttagggagagaaaaataaatgaggaagttatatgctattggtgaagcattaatcgattttattccaaatagaacaaatattgaacttaaagatgtaacgcagttcagtcgacaagttggcggggcacctgctaatgtggcaagtgtggctaaaaaattaggtagtaggacagaaatggttacacaattaggtaatgacgcttttggagatattatcgtagagacgttagagaaaataggcgttggtacaacatatattaaacgaacacatgcagctaatactgcactcgctttcgttagtttaaaagaaaatggggaacgagatttttctttttatcgtaaatcatcagctgacatgctttattatacatacttcgaatttagatgaaatcaatatttctaatcaagatgttctacatttttgttctgttgatttaattgaatgtgatatgaaaaatgcacatcttgctatgattgaaaaatttgaagcggctcatgggatgatagtgtttgatccaaatgttagattaccattatgggatagcgcagaagcgtgtaaagcgactattcagtcatttcttccaaaagcaaatatcattaaaattttagatgaagaaattgaatttgttactggaataagtgatgaacataaagcgattcaatctttatttaaagggaatgttgaagtagttatctatacacaaggagacaaaggagcaacagcctatttaaaagatgggacaattattcatcatcaagggtataaagttgaagctgttgacactactggtgccggagacgcgtttattggtgcagtcattaatagaattttaaatacagaattaacagacattacttctctatttaaagaaaaaggagaagaaattttaaaatttagtaatttagtagctgcaaaagtaactactaaatatggcgctattgaaagtattccaagtttagaagaagttattgaagaactttaaaaaagagattaagaaaccccttcagatattaaaatgaaggggttttaatattatatctttttaacattacgtacagaggcatagcaatgctcaccatttctgaaagttacaattcgttctttagaatcgactgaatcgatattatggcgatttacaacaaaactattgtgacatctgaaaaaacgatcatcgagttgtgctaattctttaagatttccgtagaattcaatctgacggttatcaagatgtgcaattaaacgatgggattttgtagacgattcaaagaacatgacatcatcatattgtacatatattgaattgctaccacgctttaattcaattgtttcaacattgctttcttttgaaagtaattttaaacgtgtatgagcagtttcaatgcaatctattattcgcgtttttagttgattaggatcatctttaaaaataaaatccattgcagataccttatagacaaatgttaggtaagtgagttcactatgacttgtaacaaagatgatattcccaataggatcgtactttcgaatttcacttccaagtttaataccgttaatatcagcttccaattgtatatctaaaaaataacatccaacatcattcatttcttttgactgttcaataatttcataaggatcatctgtcgctaacgctatttccatcggtttttcttcaatcattatatagttgttaataattgaaaccatattttcacgttgtttcacatcgtcttcacaaatgaatattttcattttctcacatccttatggcatattatttataatttctactttttgaacgaagtagccattttctatagtcgtatcaagtaacacgttttcagtagtatcagtaatttcttttaaagtcgttagaccaagtcctctgttatctcctttagttgaaaaggagtcttgaaataattcatggattttcggcatatcttctttacatttattcataacaataaacatgactgacgtttcgacattgataaatgcaattctaattaaggcatcttctaattcttctgaagcctcaatagcgttatcaatgataatcccaatgatacgacttaaatcaaccgtattcatctcaatatgatcaattaactctggcacctcaatactaataggtatatttttttcttgagcttgtaaaattttagttgttatcaatcctttaatagcacgcacttttaaattatccgtaccattaattttgattgagttcatttgaaggttatctttcataggaacaatattgtcattaaaatatgtctttaaaccatccatatcattttctcttatgtattctgacattgtagtaagaatattgacataatcatgtctaaacttacgcatttcattattaatcgattctatttgtagtgtgtattcataatatgtttcaatttcttccatattacgtctgtagcgaagttcacgtagtgtatatctagaaattataatgattaaggtgataaaaaatataattattccaataaaaattagcccataaatttttaaagaagcattattaattctaggtgtttgcgaatatattagtaaaatgataaatgatgaaactaaaacaattgtaataataattaaataagttttattaatagatagataggattgcttaaattttttaaatacaattttaaaagtataagcaagaataatagagattaatgaaaacaaagttaaatatatcattaaaattaaatactgattatctaatgtattttcaataaaaattattaaaaagaaaacgataaaattacttaaaaacattaatattgcgctgcccaaaactgtgattatagaataaaactttattttataataaaaaaatattccgcaactgataagtaaatataatatagatatacttccgaaaaaataatacaaaagagcagaagggattataatcgctaaaacgattaaataatcccttgttttatatttaatatttgaaactattttagcaattataaaaaggagaaaaccttgaaataaagctaaaggtacattagataataaatccatggcacacacactttcttaaaatactatctttctaaatttgttaactctttaggaacttctggttcatcaaaataagttgcacaaggtgaataagaagcaagtgtaccaacagtttctaagattaatgagaatagtttaatgaataaatctgtaataaatgtcataattaataatcctccttaggaaaaaagaatggtaatagtgttgtactttcaagtatcatacctaataaaattaattgtttatatggctctggtactataatagaaataatgattaaaaccactactaaaataatagactttatttttttgcgaggttttagtcgttcgggtatgggttgtttcttagtggcagctggtgcataaataataatcagtaataatgcaaggccactaacactatacatgatacccatattaatatgatagtaagcaatgagccatggtaaaccaacaaataagattaaattttgaatatggcatagcaaagtagactttgcatgcgccccgtgtgcattgtgtcgaattaaaaaataactaatgtgtgtgattaaagtatacaaaaatgtatggaatatgagcgcagcaccatatgtcacaattgttttagcaatattactaacaaccacttgcatgcctaatcgtacttttaagaattggatatgatcaaggttgtttttcttctgtaaataagatgcaaagtgctcaattttatcatcaattgctttcaatattgtgccactctccttgactatattatacaattttgtgcaattagtctgtaaaataatgcttaactgttaaaatttaatacttaactgttaaagtaattcgataactcatattttaccatataaaaataaacagtttagtagaaaaagttgcaagttaagaaatttttaattacttaaatgaatgttatgttttaatatactcatatcacattaaagtgatatcaacttaataatcttagtctttaaattgttagtctttgttttattcgaataaatctttttttgattttgttagtagttgcgaaattaaaagttgatttatcgatgagttgtaaggaatgtttgtgtaatttgactatgtatttgtgatgatcgagaccaatgggttattcgataatatcgattttcatagtaaaatatttcatttatttatttctttgtgtagttccattcattaataagctatcccaacttattgatgagaaatgcataagactcgctgaagtgttaactcagtagaaaataattaacttagctattctgaatagaaggtaattattttcaatatgcaagctatcataacattgttatgcaatgtaatttttcataattaataacatccccaaaagattgaaaaataactgtaaaacattcccttaattaaaagtcgtgagtctctcccaagctcacgactttttttatttatataaatgaggttttaaatttctaaagattggaatagcatctctttgacgtgatacttcttgaatgttgatatcaactgaaatagtatcttcttctctgtttaactcaacaagaatatctccattaggattgataaccattgaatgtccagcgtattcagtatttccatcatgacctgtgccattacatgcgacgataaaaatatcattttctatagctctagcttgaagtaagtttctccaatgattaagtcgagatgttggccattcagcgacataaaatgcgatttgagcaccttctctagatggatatcttagcaattcagggaatcttaagtcatagcatataatttgagtggtgagagcacctgatgataaagcaaatggttctggaactgtttttccatcctctaaaaattctggttcatttagcattggaactaaatgaactttatcatatttgttaatacgacgaccttttttagagacagtaaaagcagtattataaactttattattttgtttatttgaaacagatcctgcgacgatgtcaacttgatatgtttgagcaatattcgaaataaaaggaaaactacgtgataatgcttgatctgctttttcatttaattcttctaaagcatagccattgttccacatttctggtaacacaacaacttcagtatcatcatctaattgagtattaaaccattctgaaattttttgttcatttttctcaacatttccatattcgacatgaaattggaatatttgtattttcactttaaccactcctcaacctgcttaataatttcaatttactaaatttggctaggaaaagcaaaatgaagcacattacaattaaagtaaaataacttaattgtaatgtacttcattgataagtttaaatttattattttttaataataaatcgttgatcagtagggtgaatttctttttcaccagcttgttcttcaatatcaccaaatggcatttgtgctacaagtttccatgatgctggaatatcaaatgtttgtgttgtaacttgatcaactagtggattatagtgttgtaacgatgcaccgataccttttgaacttagtgcagtccaaattgcgtattgatgcatagcatttgtttgaacagcccagttagcaaaattatcagcatatgatggcatttgttcttgtaatgattttataacatcttcatcttcaaaatataaaatagttccgtaggcatgctcgaaaccattaattctttgatttgtaggttcaaagtcacgatctggtcccattacatctttaagtacagttttagcattttcccagaatttaatatgttgatcattaagtaacaaaacaatacgtgttgattgtgaattaaaagctgaaggcatgtattttacaatatgttcaatcatttcctctaattcttcatcactaatagaaatagatgttttagttttataaattgtacgtctattttcaatttcagttagaaatggttttgtgttttctttatcaaataattccatcttataatctcctttttttaatatatttcttgtataaaatttatactagaataagtaaattattatataacaaaaatttcataaatattaatgttttttatcaatttgtttatatacatgcatgatattttttatttctttatactaaaattgttaaaaataagaggaggtctcagaatgataaaacaaaaagttattcgaacaagtcttatttttgctataagtgcaactatattcagtcactatagttatgctgaaacctcttctaatatagagagtgaaggcgtagatcagaaagtaaactcacaaataaattctgatactcagcaatctaaaattaaactaagtaaggaaaacataaaaaaatttaattatactagtgatgaaactagcaacacagaagaaccaaaaatagaaaatatacatcaagaaagcgacgagactaacagtaaagaaaaatcagcagcagaagagtcccaacaagaaagtgacgagactaacagtaaagaaaaatcaacagtagaagagtcacaacaagaaagcaacgagactaacagtaaagaaaaatcagcagtagaagaatcacaacaagaaagtgacgagactaacagtaaagaaaaatcaacagtagaagagtcacgaaaagaaagcgacgagactaatagcacagaaaaatcaacagcagaagaatcacgaaaagaaagcgacgaaactaatagccttgaagaactaaaaaaagaaaaagttaatgataagaatcaacaaaagagtggaatagaacatattcataaaaataacacgtcatcttctaaagaaaaaaatcatactaaatataaaacagcacaaaaaagtaaaaattataaaaatgatgattcaactatttttaagcaagaagaacatcaaaatgtaaggtctaaatcaatgaagtcgaaacaaaatcaaatcatacaaccatataatgataatacttcatccaatgtttactcaaaaactacttatcaaaaggataagtctcaaaatagtatttccaaaacaatgtttaaccaattggtttcacgacaactagttgaaaacaatcataataattttgaaccaacacatttaaagcaaaataatctatatttccaaagtgatagaggaaaagaatccacttatcgaaatgcatatcaaatagagtcaagattttcagaaaatatcttaaataggtttaatcaatatgcaaaaggtgcttataagtacaacccttatattattaataagattaatcatttagatgataatggtaaaaagataacaaataaagattttaatcgtttaattaagaaacaaaaatttgataatcaaaatctaaatatattacaagaggattctcaatactttagatttcaatattttaatccacttaatgctaaagaatattataaaaatttagatgagcaagttttatcattaattacaagtgacattggctctatgcctgatttaaaaaagccaaaaacaattcataaggatgaagtagaagaagaacaacataaaaaagtcattacttcttctcataaaaaaacagaatcaaaatcatatataaaaactttgaatatgacactgattcctactttaattttaatatcttccactgtaatgataatttatgtatatcaaaatttaaaaacgaaaaaaaagtaaaagcatcaaatgtctagagcattcgatgcttttatttattaagataaattatgtgctaattacacaagtgaataataaattgagtttgttgtttcaaatgatttaatgaatcgccaaggaaaaattgcattactacaacgaagccattttgaaatatatgaataagtatcggcacagaaattcgttttgttaaagtataagctaacgaaagtatcatccccataccaaaataaataagaataaatttaatatcattatgcgctaatgcaaaaagtaaagaacttacggtagaagcaattaagaaggcaatgattctatttcctttaattcgatcatatagttcaccaaagaacacttttctaaatacatattcttctaaaatagggcctacaacagaaattaatataataaaaataggaagttgttttgctacagccattattcgttgagtatttggactttgttgtggttgaccgaaaatccatatgttaatcacacctacaataacttgatataacataactatgaaaaagccaagtatagcccatgggataatataacgttttgattctttatgttcttgctctaagtttgtaggattcttaattttgaaatgaaaaaagatgattaaaattgctgcaagtataaataagataacttgagtatacaccccagccctagctaaagccatacctgataaacgactaaatataggcgtttgtgctagaactaagggtaaaaattgtgctaaagcatatataattaatgttagtattgccacccaaattcttgccatttgaaacctccagattaaatatcaattattcttattttatcgtaaaaaactcagatgtacaaaagtaagagagagtttttacttgaaatattgaccaaatttgattattataaaaattagattagcactcattatattaaagtgctaaatagaccctgctaaggaggaacaatcatgcttaaaccattaggaaatcgtgtgattatcgaaagaaaagaacaagaacaaacaactaaaagtggaatcgttttaactgatagcgcaaaagaaaaatctaacgaaggtgttgtagttgcagtaggcagcggacgtcttcttgataatggtgagacagttgctcccgaagtaaaagaaggtgattcagtagtatttcaagaatatgctggatcagagattaaacgtggagaagaaagctatttaattttaaatgtagaagatatattagcaattatagaaaagtaaaaataactatataaaattgtcgaaaaacaggattaatattaatggaggttgtataaatggctaaagatcttaaattttcagaagatgcacgacaagcaatgttacgtggtgtggataaattagcaaacgctgttaaagtaacaattggtcctaaaggtcgaaatgttgtattagataaagaatatgttgcacctttaattacaaacgatggtgtaacaattgccaaagaaattgaattagaagatccatatgaaaatatgggtgctaagttagttcaagaagtagcaaataaaacaaatgaaattgctggtgatggtactacaactgctacagtattagcacaagcaatgattcaagaaggtttgaaaaacgtaacaagtggtgcaaatccagttggtttacgtgaaggcattgataaagcagtcagagtagcagttgaagcattacatgacatttctcaaaaagttgaaaataaaaatgaaatcgcacaagtaggtgcaatttctgctgctgatgaagaaattggtaaatatatttctgaagcaatggataaagtaggtaatgacggtgttattacaattgaagaatctaatggacttgatacggaattagaagttgtagaaggtatgcaatttgatagaggttatcaatctccatatatggtaacagattctgataaaatgattgcggaattagaaagaccatatattttagttacagataagaaaatttcatcattccaagatatattacctttattagaacaagttgttcaatcaagccgaccaatcttaatcgtggcagatgaagttgaaggtgatgcattaacaaatattgtattaaaccgcatgagaggcactttcactgctgtagctgttaaagcacctggctttggtgatcgtcgtaaagcaatgttagaagatttagcaatattgactggtgcaacagtgattacagatgatttaggattagaattaaaagatgcttcgattgatatgttaggtactgcaaataaagtagaagtaacaaaagataatacaactgttgttgatggtgatggagacgataacagtattgatgcacgagtaagtcaaatcaaagcacaaattgaagaaactgattcagactttgatagagaaaaattacaagaacgtcttgctaaattagctggtggtgtagcagtgataaaagtaggtgctgcttctgaaacagaattaaaagaacgtaaattacgtattgaagatgcattaaattctacacgcgctgcagttgaagaaggtattgttgcaggtggtggtacagctttagttaatatctataataaagttgaagaaatagaagcggaaggcgatgttgcgacaggtgttaatattgtacttaaagctttatcagcaccagtacgccaaattgctgaaaatgctggattagaaggttcagttattgttgaaagacttaaacatgctgatgcaggtgtcggattcaatgctgctacaaacgagtgggtgaatatgcttgaagaaggtattgtagatcctactaaggtaacacgttcagctttacaacacgctgcaagtgttgctgcaatgttcttaactactgaagcggtagttgcaaatattccagaacctgaaagtaatgacaatgctgcaatgggtggtatgccaggtatgatgtaaaaacacctataaatgttgatatatcaatgttttgtgtttttactggtcatggttatagaaatttagaaaatataataaaaagactgataagttcattttgaagtgcgctcagtcaaatagacaagtaaataattaaaagatatggttggttttgttttatgcaaaatcagccatttttaatgttagttttttgtattaaaaaagtagatatattctttaattacttatttaatttcactgatatctttaaatataatttgaacaatttttacataaaacttgtcgaaattttacatcttttgatttttaacaattttatttaatatacaaattgaaaaaaagataataaataaaaatgctaaatttaataatcaaaataataatatagattaatatagtgataaaagaattcttgctttttatatttatgttgttatttaattttctgacggttttgattataaagtgaatctgtactgaaatattgattagttaattcaaaatgatccagtcaaaggtgatgtatgggttaaatggtatgcaaaattattaaatgttaatcctaatatgaatattgaactagcgtcttcatttgaacgtggtgctagtaatgaaaaactcaaaaaacatggtggaacactgatttatattagatggaaagatagaatgaaccctattaaatactatagtgacttaatagaaaatagaaaagtatgagttttatattggagtctatggcaaaaaatgattgtcttagattccttttatatattggagtgcttataaaagttttttaaatataaaaattatataatttttatagtatttattttaagtgtttcgaagtataatgatagcaaagatataaataaacattgacttttaaaggagaatcaacaatgaggattaatattttacaacatacccctaatgaaggtcctggagttatcagagattgggctaccgagcatcaccatgaattatatatttatcatccttattttaatagtggtatccttcccaatgttaaagaaacagatttacttattattttaggaggacccatgagtcctaataatgaggataaatggatttttgaagaacgagaattaattcgcaatttaatacagcaaaataagccaatatttggtatatgttttggcgctcaacaaattactaaagccctaggatatactgtaggaaaatctccagtaaaagaagtcggttggaataaagtttatcgtgagtcatccatcattcctaatattccaaaagaattgatggcattacattggcatgaagaaacattttatatacctaaaaatgcacaattattattttcaagtcaatatttaaaaaatcaaggatttattttgaataataatattatcggactacaatttcattttgaaccaggtgctcatgatataaaagagattgtcatgaatgatgctccatacgtgtttgattccgtattaaatcaaacgccagaccagattcttaaccaagaagtaccaagagagaataaagaagtaatgtttaaattgttagattttattacaagtcattaaaaaatagcgagaaccttcctggttaggtctctcgctattatacttttatgttattttaagtcatcaattgctttagcaatagaatcaaaaacatgtggaatatcgtttttttcaacacaactaaaagcaatacgaatatctgtatcattaagtgcaataataccaattgaatagttatcgattaaatgaacacgaagtttttctgggttaacaccgattactttaagtgccataaagtatccagagttaaaatcatatgcttgccaatgttgtttatatttttcatcataaaccacttcttttgttacttcataacgttcttgtaatgtttttacattagcttgaatttctttatcaaattgttcatgattctctagtatatatttaattgcactttgagaaggcattgctccacttgaaatattacttctaattaatcctttaactttagcctctaatacgtctttagctttttgattacttaatccaaatgtaagaaagccaacacgtaaaccccaagcaaaaaattctttagttgcaccgtcaaggcgtatcggtaaaatattttttgaatctaattgagtaattgcagtaaaaatagattgtgtatagacatcttcataaaataaaccatagtatgcatcatctacgactgtaatcaccttagttcctttttctgctaagcgttcaattgctgagacaattgtacgaacttcttctttagtaggtgtatagccagttggattattaggatagtttaagataataatagctttatcttgtttaaaattatctaaagtagatataagtgagtttgttgtataatatccatcttgatcgaaaatagcataagtttcaatatttgccttatgtcttgtattaaaaataagtttatagtttccccagttatgtgttggtaataaaattgtatcttcatcatttacaaataagtcagcaactaaagataaaccatgggttaatgcattcgtcacgatcggacggcttatagatgaagcttttaaactaggattttcttttaacattttttgttgccataaatctcttaaagtttcaattccttgtggcggagcatatgggaaaatctcatcaggcgaaagatgattgtagacatcaaataatgtgtctgcatacatttttcctttatcattagttgccataccaattgttgcattgtattttgttgatttagcttctgcagactgagacagaatacctttgggataaaacatagattgacctaatgtcgataacatgcttaatatttcaggacggtcatcgcctagttgatcgtttaaatgttgtgctaaaggattcattttcataacctcgctttaaattgttattcacattatatattatcttgaattaaacaaaatataaagttttctaataaaaaataaagcagagaagtgtttttatccgtaaacggaacgtatgttctgtttgtgtgttaaaatatatatataggtcatcatgagatatgacactttactttgtggaggtgtagtgtaatgtcgtggttattagaaagtttagtcacgcttataacagggagtatgctgattatatttcgagtttggttagaaactaagtggaaaaataaataagatgaccttacacaaaaaccccttaacttgatgtggcaagttagggggtgtaatgcaatttgtggatataacactatcttaacatagaacaaatacaattcaattttaattaaataaatgattaatgcatataaaataaaaaatttgatataattattataatgaggtgactaaaaatgatgaaacacctaacaaaaatttttgtaggtttagctattgttttgtttgtcattggatattatctacaagccactggacatgaaagtcaaggtataaagttattattggctgccattatgtttatgatatgtgcatttattaatcgtagcaatgacagacgtaaaaataaaaagtaacatatgaaaactatgatgcaattaccactgtaatactgtatcatagtttttttgtttaactatgtttatagtgtatatacaatttatgtcttaagaatactgattttatcttatttttattatttcactttacaaatctgtatatactgtatatattatttatatacagttgtaaagggggacataaatgaaagttattctaaaaaacaccagtgaacagcccatttatgaacaaattaaacaacaaattaaagaaaatatattaaaaggttacgttgaagctggaagtcacttaccatctatgagggaactggcgaaagatttgcaagtcagtttaattacaacaaagcgtgcctatgaagatttggaaaaagaagggtttgtcacaacaataagaggtaaaggaacattcgtaaaagaacaagatagttcaattttaaaagaaaaacaattttttgtaattgaacatcttgcacgttccatggtaaaagaagcaaaaacaattggtatgcctctaaaagaattaaatgaagttttagctttaatttacgaggaggaagatgaatgaaagcgattgaagttaaacacgtaagttataacactaaaactttccaaatcaaagatctttcattcagtattcctcaaggatttgttacgggctttattgggagtaatggtgctggcaagacaacaatgattcgattaatgatggatttacttgaacctaatactggagaaattaaaatcttaggacgacaaatgaaagaatcagcaaaatggattaaaaataaaattggttttgtttactcagaaatttatttcaaccaacaatggaatataaaaaaactagaaaatatgatttctcctttttattctaagtgggatagtcatatattccatcagtatttagagcaattcaatataccaagtcatcttaaaattaagcatttctctagtggaatgaaaatgaagttatctttagccattgctttaagtcaccacgctgagttatttatattagatgaaccaacagcaggtttagatccaattgtaagaaatgaagttctagaaatattgcagcaagaattaatagatgaaaataaaacggtttttatttcgactcatattatttcagacttagaaaaaatagcagattatcttgtatatataaaaacaggcaatcttgtacttgaaggctattgtgatgatataaaagaggaatattttatcgtaaaaggtgataacaaagatttagatgatgaattaaatcaactccttttatataaagaagaaaagcatacaggttatgtcggttttacaaaacatggtcaagcatttaaggaattatttggaaaacaagttgaaataaaacatccaacgattgaagaattaatgatttaccttgagaaaatgaaagaaactaatgatgttgaaactccaaatagaaatgggttgatggcatgaagcaactaataataagaaattttaagttaagacgttggacacttatcatttatttagtgcttattgttattaatcctatttatacactatttttttcaaaaacaagttatggtttcgttgtatatattccacttgccattacattaatgattataagcattttagattcaggacaattatttagagtacatagacggttaggtggaaaagagtcgtatcttttttatgaaagtttaccaataactaagaaagaattgcttaatgcaaattatctgacatgtattatattaacgattttaggaacattgattattggattatataattttcaatcaacaaatattcaggtaaatgagttgcgttattcgacagcactttcatttttaagtgtaaatttatttagcattcctattgcctttagtaaaagtacagaaagaaaaagagaatatatttcttacactgtttatattattttaatggtacttgctataccgatggcaattgcatttatctttttgactattaatttatttatctttcataatgcacttgatccaaatgtatttaataaatatttaagtattggattagttattataagtgtgatttggctagttataaattattttattcaaatagcacgtgttaatcgtcgctagaaaaaaggaggacttttatgaaattagaaaatattactaaaatatacggtaataataatgttttagacaatatagattttgattttggagatagcaaaattgtaggactcattggtaaaaacggtgtgggtaaaactacactgatgaaagtgatgaatggaaatattattaattacaaaggtaaagttaatttaaaagatgatgaaaatattggctatctcattgaacatccaaaactttatgataataaaacaggactttataatttaagactctttgctcaggtgcttggtcaaggatttgataaagcatattcagataaaattatagatgcttttggtatgcgtccgtatattaagaaaaaagttaaaaaatattcaatgggtatgaaacaaaaattagcgattgctgtatcattaatgaataaaccaaaatatcttattttggatgaaccgaccaatggcatggatccagatggctcaatcgatgttctagaaacgatacaatctttagtaaatgaattaaatatgaaaattcttatttcaagtcataaattagaagacatcgaattaatttgtgatagagctgtctttttaagagatggacatttcgttcaagatgtcaatatgaaagatggtagtgcagaagaaagtacctctattacgttggacaatgatgattttgatcaagcgctaaattatttacaagaacattttaatgttattcattcttataaacaaaatggagaaattcttattaaagcagaacgagattatcgaacattgcttaaagcgctcgcacatattaatgtgtatcctaaatatattgaaacacgtaaaaattcgcttcgagatacgtactttaatattaatcaaagaggtgaccattaaatgaagagtttacaattagttaaatatgatatattaagttttttaaaaagttatttaacatatatcgcgcttatatgtatttggggtatcatcacagcaatgactgtactattagcaaaaaatactgataaagtcgattattcaatgatattaccaatggcaaattggatgtttctattctttggtttacttgttgttattaaaacaattacacgtgattattctcaaggaacgattcaactttatatgaataaagtgaaaaatagagtaggttatgtgatagcaaaaacgatttcgattattattttttcgttcatatttacacttatcacgtatgttacacttttagttattcaaacttttacagatggtaaaaatttaaatggagataaattcctaacaaatatttggttctatcttatctttttactattttttggactattattattcttaattactttaattgtacaaaaaccagcagtcatttttacattaggtatctttttagtgtttatcgtaccatttttacaaccatttttaggtttaatccctgaatggggcgataatattcaaaaatcactcaaatatataccttttagttacttaacagaaaaatcatcatcaggtagtattgaatttacgaattggcaatggttcatttctattgcatctattgttattttatttatcgctgatgtactttatgctgctaaacgagacatttaaattaataactttttaataaaactggcgacgatacgttcaatttttgtcgccagttttatttgcattgaaagatactttaatatttttttgaatataatcatagttatgatatattaaaaaaaataagtatataagtggtggtcctattgcatattcaaaatagatgggttatctcaattttatttattgtcatttctttattagttgtactaggattgacaatttataaaaatgaaaaaacggttgatttaagtgatgtagaaattaatcatctaaagcttaatgaaacgtttgataactcagaatatagtttaaataagcatgtgaaattagataggtatattttttataatcataataaatataaaaatttaacaataaaagtcaagaaaaaacatcacaaaattaaaggaattatcttagttaaagatacttttgttaacacaaattttgatgttcatataggtgacccaatcgatgctgttatagataatctaggttataactatgacaaagataaggtaggtaaaggttatgatgctttagtatatcttgataaagatcatcacatgaaattatcaattttatataaagataatattgttaagcgaattgaattctttagtcgttgatagttaataaaaataaatttatattttaagaaagtatgtgaaagagaaatggataaaattacttttttgaatgaactggaaacggagcttgatgatttaccacgtaaagacaaagataaagtaatgaatgaatatgaagatatcttttataatcaagaaacaaaaggcaaaacagatgctcaaatattagatgatttgaaaaatccttatactattggaaaagaaataaaagctaaagaagcaatttcacatgctaaagttacacctaactttcgtaatattgtaaaagctattatggcatcattaagtttgggtgttatttcttttttcttaattgttatcccaatgataatattcttaatatttctagcctttgttttcgtcatttcaattgtgcttatttgtttacctatcttattaattattattagtatccttaaaagcactcctgactcttttagtaattttctttatagtatttcttatgctggaataggtatattagcgttcgttgcaataataaaaattgttcagaatttatataaacttgttttaaaatatttatcatggtatataaaaataattaaaggaagaatccagtgatgaaaaagttaacaataagtggattagttatatttgttgttttttttctagcagcaacgttggtatggtttgttcatgataaagatatttataaacgactgaaatataatgaaacgtttcatcaatcatctatctccaaattgaatatagatagttatagttctgatatcactattactcaaggttcttcatttagagtgaaatattacggggacaatagtataaaagtgaacactcaaaaagacagcttaaatgtaaaagaatcacgttcttctaaaagagggtatagctttaatttaaacccttttaaaagaagcaagttcaacatacatataactattccacctgataaattaaaacaattaaatattgatgctaaattaggaaaattaaatattaataatatagatatcaaaaaagccagaattagaaaagacggagaaaatttaaatatcaaagaagctaaacttgatcgtattgattattatagcgatcatggaacaattaatattaaaaatagtgatattaaaaatagtcaatttaaagtaataaattctaatattgtggttaatcattgtaccttgaaaaatgggttattcattacaaatgaaggaaaacttgactttaaaaacatgccaagtcaaattgatatgaagagctcaagtaaaaaaggtgatataaacattgagtataaaactaagcctaaagacaccttgttaaaactacatccaggaatgggtgacaataacattaagaatccttattttaaagatagcaaagtaggtgatagttataatattatagagtgttataacgttaaaggtgatataaatattaaataggatgaaaaagattagacaaaacgttgattaattaaattttaaaacgtttatctaatctttttttattaatacgtagcaaatgttaaatcagtatctagctttccagtaaattctattaaatcaagttcatgaccctctaaccatgactgaaagtcgatagatagaggggggttattctcacctaatgtcatccaagcttttaaatgtttaggttcatacattgatgtatgaatcgttcctgaccaacttttaaacaacttactataaatattatatttaggatcattaaaaagtttaaacgcagtatatttatctataccttctgaagtttgactaattgtgcgagcaagacgttctttagattctttggtatagttacgattttcatgtgttaatatttcaaagtgattagtacaaactttatcatatctaacatcaaatgagcgtggcgtaatttcaacaattgcatgatttaaatgcttatccattaaaatataactaaatgaacttctatggggtaactcttttagaaattgaattgcttcttttacatctttacaatattctaagacaagtcgtcctaccatataacatacaaatccatttgcaggatgcttacggtgcataaaattatatcccatcacaagacctgcttcattcataccatccatacgaccagttactctagaggttggtcctatttgcgcgagtccaccatcatttggttgataaagaagatatctgccatcatatgtagcaggatgatagtcataattacgaaccatataatctttaccttgaaaaactgtacatccactttcatttaaatcagtaaaacgatagtgaccgaaatttaaaatcatttgtttagtcggtaaatttaatatctcttgcattcctaataattcttcccagatttctggtgcatacgtttggaaaatgctatatgtttcattaacatcaatgtcaaaacgaggtatacgcttcttccattcacgttctctattttctagtaagggcgtctgttttaaccactgagcagttttgatacctaaatcaaaatgtgatccgcgaaaggtcataatatctgacttaacttcttgcatgaaaaatcctcctatcatttgttttattatttatattgaacaataatttatattaaatttaaagccttataatgtttatttatatatgatagtaattcactgtgtaaataagaccaatgtcattcattataaataaagaaaaaatatttgattttttaaaaatctttaattttaggtttgaaataatatataaaaaggtatgtatttaatcataacgttaactatgttaaaattatttaatgtaaacgtatttattttaagtacaggggtgaaacataaatgtgggatttcattaaaggtttatttaaattcttattaagctttacagctattacagcactagttgttggtgtagtagtagtagtatttggctttattttcaaaaaagactttgaagatatcgaaagaaaaacaaaagaaatcgtatctgatattgaaagcaataatgcttaatgcaacgatgtaccatataccagtaatttcatttgaagttactggtttttttattactcttaaataaatacaattagctagtataaatgttaataatattgaatataatggaggtattaaaatgacaactaaaggttatgtggggtcttatacaaaaaaagaaggtaagggtatttatatattcgaacttaatgaagataatggagaaatacaatcagtagatacaggatatgatatcgaagcatcgacttatcttgctcaaactgaacaatttttgtatgcaattactaaagagaatgaggcatgtggtgtggctgcatttaaaaaagacgagaatggacagcttacactcattaataaatgtttagcttcagagaatggaacagggtgttatatttctgtttctagtgatcataacttcttattcgaagcagtttatactgctggaatagcacgtatatatcaacttaatcctgagacaggcgaagtggtaaaattaattgaagagttagaacatagttatccaactggaacacatgagcgtcaagatcataatcatattcattttattagagaaacccctgaccataaatatgtagctgtgactgatttaggtgcagataaaattgtaacatatacattcggagttgaagggtttaaagaacatgcggtatcagaattccatgctgaagatggaccgcgtcatattgaattccataataatgggaaatacgcgtatgttgttcatgagttatctaatagagtaagcgttgtacaatatcatgatggaaaatttgaagaaattgaacgtcatttaacgattcctgaagatttcactgaagaaactaaattagcagctgtgagactatctcatgatgaacaaaatttatatattagtaatcgtggacatgatagtatagcgatatttacagtagttgacgatggaaaaggaattaacccggttgaaatagtaaaaagcgggggagaatttccaagagattttaatattactgagtcagatgaataccttgtatgtgcacatcaagaaggaaattacgcgttaacagtatttagacgtgatacaaatagtggtatgttgattgctactgacaatcagtataccgcacctgaaggtgtatttgttgatttcttgaattcatcgttatagataaaaaatacccctataatgtaaacacttgtaaagtgagccattatagggatttttttataagtttttgaaaaatgttctaatatatttgaatttacctttataagggggatagataatactcgaatctagtcgagtagatttaaaaatatatgatttcatatgactaaatgtatcaaatgaatatttgccatgatattcgccaattcctgaagcacctacgccaccaaagggtaaatttgggttagctaaatgcattaaagtgtcattgattgcaccgccaccaaatgacaattcttctagcacacagttcgttgtattttcatcttcactaaataaatataagcttagaggtttagatttgctttgaataatatctatcgcttcattaaaatcatcgtagacgatgattggtaataatggaccaaaaatttcttcttccataattttagattgtggagtaataccgtctaaaattgtaggttcgatatattgttcattttcatccgtatgcccaccaaaaatcacttcattacgatgtattgctaataattcagaaagtcgattgaaatgttttgtattaacaatacgtccaaaatcagggctattttgaatatttttgccatagaattcttcaatagattgtttaaatgcttgaattaattcatttttaacttttctattcactaaaatataatctggtgctacgcaagtttgaccagcattggtgaatttaccgaagctaatacgatcacttgctactttaatattagcagtttcatctacaatcactggtgatttaccaccaagttcaagtgtgacaggaactaaatttttacttgctgcttcgtaaacaattcgacctacattttcgctaccagtaaagaatatataatcaaatggaagattgattaatgtttgagtttcttcaacgccaccttcaacgacagctacaaaatcgcttgcaaacacatcttcaatcacttttcgcactacttgtgcaacatgaggagtaagttcagaaggtttaatgatggcgttattaccagctgctatagcaccaataagaggttcgaataaaagttgtacaggataattaaatggaccgataattaatattgtcccatagggctcaggcttaatataactctttgatggaaacataaatagtggtgtatctacttgcttagttttagcccagttttttaattctttacgagctgtttttatactttttaaaagtataccaatttcagtagcatacgcttctactgaacctttccctaagtctatttttaacgactctaataattctgtttcatggtctttaatacttttacttaatagttttaactgttgtttacgaaatttgatatctttagtttgatgtgttttaaaaaactgtttactttcttgaaattgtttttctattaaattcaattgtagtacctcctgtacagtcaatcccaataccgttataggtgtagttgactatataattttagttaaatgtatccaaggttaaaacatttgaatgaatgattaaaataaattaaaaaaggctgagagttaagtaacctactatctcagccttattatatatgaattaaaatatgaattatttagttaaaatttcagtgatttgaggtacaacttgttttttacgagaaactacacctgataagaaagccataccatcatctaattgaacattgaaggcttgaccaactttatccttttcagccccgacaactaaaattttagaatcactgttaataatatcagtgacaactaatacaaataaatcatatttttcgtttgcacttgtttctaacattgctttttccaattcatctttacgatttaagacttcatcaatatctacagtattgacttgagcaatacgagtaacataatctcccatattaaatgatttagcatccatatttaataactcttcagcagatttatcagttgttgaagcacctgctttcaacatttctaaaccatattcatctaaatcgacattagcaatgtcttttaatgctttagcagcatttacatcttcttcagtacatgttggagatttaaataataaactatctgaaataatagctgaaatcattaatccagcaatttcaggtttaatcttaaagttacgttctttatacattttataaagaattgtagcagtacaacctacaggttctgcacgatagtataaaggacctgctgtttcaaagttcacaattctatgatgatctacgacattcacaatattcgctttagcaatagtttcagcactttgttggaattcattgtggtcaactaagataacgtcttgaccttctaaatcatcatttaataaagttggtgcatcaactttaaaatgatctaatgcatattttgtttcagcactcacttcacctaagcgataaggagttgcttcagaatttccagtttgttgttcaaaatcagccattataatagctgaagatattgcatctgtatccggattttgatgtccaaaaatataagtttttgccattgatttattcacccttaatttttaaatttatccttattttagcatgttttaattgataacttctacctttgcacctaatgagtttttaaaatgagctaaagcgaactgatgaccctcttcattaaatgaggcaacaccttgttcagggataataatatgatagcctaaattataagcagaaattgctgtatggagtacacatatatcagtacatacacctacaatttcaacagtatcaatatgtctttctcttaataaactatctaaagcagtaccataaaaagaatcataacgtcgcttatctaaataatgtacagtatcttcatttttatatttatcaaaaaatgattttaccttaccatataattgacgacctgaagtgccttcaatgttatgtggtgggaataatttagtttcaggatgatacgggtcttcttcaaaatgtaaatccatcatgaaaaagatattatcatgttgatgttgatattgattgagtctttctacaataaactgttcaatatcttggcctggtttaccacaagttaatcggccgtcatcagcgataaaatcataagaataatctacaacaatcaatgctttgttagtcataataaacatccctttcttaataaatgtttgaataccttaaaaaatgtataatattaaattataaatatagtatagctatacaccattatggttacaaatatatttaataacaacataagataggggataaaaaatattgatcaatgcacaggattttggtttaaaaggaaaacataaacgaagagatactaaagctatacaaaaagcacttaatgccgcaagatatggagaacatacagtttatataccatctgggagttattatattagtaaagcattagtgatatatgattataccactttaatattagaagatgataccatcttgcaacgtcactcgagagatgcattgttaaaaaatggtaaaaaatttggtttctatcatggatatcaaggaaatgggcatattaaaataaaaggtggtatatttgatatgaacggttcaaagtacccctataataataccgcaatgtctataggtcatgctgaagatatcgagttaatagatattacagtacttgatgttgtaggtggacatgcactagatgcttgtggaatcaatggtttatatattaagaactgtaagtttaaaggcttttttgatgtaaatggtgatcgctcattttctgaagcaattcaattagacattcaagtgcctgggtcatttcctaaatttggtacgactgatggcacgattaccaaaaatgttgtcattgaagattgctattttggaaattcaaaccaacctaaaatgcaagcttggaatagagcgataggctctcatgccagtcgttataatcgcttttacgaaaatattcatataaggaataatgtgtttaacggaatgaatgaatatgcattaactccgttaaaatcaaagacaatgtttatctcaaataatacctttataaattgtaatggtggtattcgttttcttggagttaaagatggaaaaaatgcggctgatgtttctacaggacaagttcaaaagactcaagctggagataatttgactgtaaccggtaatcatttcgaaggagaaatgaaaagagatgctatacacgtgagaagttataataatgtaaaacatactaatgtttttattgcaggtaattcgtttaatcattcgacacaaagattacatttagaagatatttctaatttgacatttaatcaaaatgataaagttaaagttaaaaaaattaatattgattagtatttaatttaaaaagaattatagatgaaaaataaatgatacgcactttattatgatatataataaagcgttttcttttatgttataatatcattatatattttcaaaaaagtcagatttctatgaggcttgtttgcaatataataggtatcaaatcaactttgttgagatgatgccatatttctaaaaatagaatatattaagttaagtttctaattttaaagggggagaattagatgactaagcaatcaggttttcgaagaaatgcacaatacttaacatttttttctaaaaaagatcatacaaatcaatcttattctatgggacaattattggggctcattttaggaccgttattgtttgttcttatcttatcattctttcatccagtagaacttcctttcaaaggggtatatgttttaggaattacggtgtggatagctatttggtggattacagaagcgataccaattgctgcaacgagttttttaccactcatacttttgcctttaggacatgtactttcgcctgaacaagtctcttctgaatatggtaatgatattatctttttatttttaggtggttttattcttgcaattgctatggaaagatggaatttacatacacgtgtagctttaactattattagatatattggagcaagcacgagtaaaatattattaggcttcatgattgctacaggattcctatcaatgtttgtatcaaatacagcggctgttatgataatgatacctattggtttagcaattattaaagaagcgaatgagttgaaagatgatgacgttaaatcagatagtatttcgaagtttgaaaaatcacttgtcttagctattggttattctgggaccatcggaggattaggtacacttattggaacaccgccactcattatactaaaaggacaatttgaacaacattttggacaagaaattagctttgctaaatggatgattgttggtattcctacagtcattattttaatagcattagcatgggcttatttaagatttatcgcatttagacatgatttgaagtatttaccgggtggtcaaacattgattgaagataaactcaatcgtcttggtaaaatgtcttatgaagaaaaagtggttcaagctatttttattcttgcaagtttactatggataacaagagaatttattttaaaaaatttttcaataacatctgaagttgcagacggtacaattgcaatatttatttctattttactttttatatttccggctaaaagtaaagaaaagcataagcgaattattgattgggaagtggcaaaagaattaccatggggtgtacttatattatttggtggaggcttagctttagcaaaaggaatttcagaaagtggtttagcaaaatggctaggtgagcaactaaaaatgttagatggggtgcatccactagtaatagttattgtcattacaatatttgtgttatttttaacagaagtgacttcaaatacagcaactgctacaatgattttacctattcttgctgcgctatctgtagcagtaggtgtacatccaatgttattaatggtacccgcagctatggcagcaaactgtgcttacatgttaccagtaggaacacccccaaatgctattatatttggatcaggtaagttgagtattaaagaaatggctaaagtaggagtttgggttaatttaatttctgcagtgattattatagtagttgtttatttcttaatgccatatattttaggatttgatatttctgacacattaaatttaaaataaaattaaatatcttgaaatcatatattcactatgtacgttttatcttaatattttaaataaatatacaaaaaatgcctgggacatcatgagttcatgagtggtcctaggcatttttaatatgatgcggttaggttttcagaatgaaaggatacatttaacacaaatattgtccactcccttttattgacgatgaaaagcaccaataattttcactgaaaaatctaatgtttctaatatcgatataactttattcaaattatctgatagcccggtatctgcttgtacaaagaagcgatacatacccagttgagttttcagtggtcttgattcaatccatgataaattaatatcaaataatgcaaatgtagtcagtatacttgccagtaatccagctttgtcatacttaggggtaattaatagcattgtgttattcgttttagactcaaagttattatcattttttatgactaaaaaacgtgtaacattatgcgggtaatcttgaatattactctctatagcagtatatccgtacatttcaccactacctactgggacaatggctgctacatccgaggagattttttctaatccttgaatcgtactgtcaacataatcgtaagaaaattgatgtttgtgaatgtattggcttgtttgactgatggctggtgcgatagagtataccttttttatattttctatctttgagtcccttgtcgcatataaaccaaaattaatatctaaatgtatttctccatgtgcaaaaacatgttgttgagccagtgcatctgccacaatgtttatagttccttcaattgaattttctatgggtacaattgctacagattgagcgtcactatttactgccttaatgacttcgtataaattagactttggtatgaagttaaaattatcttttgaaaaatattttttagcggctaaatatgaaaatgtaccttcgggacctaaataatataaatgcatgatgaattgtcacctcatgaatcttgtacattagtggaatggacatttcatcggtgtcgcttttttataatggaaattaggatctttaataatatttttgtatccatgatgataattagcagttaacgttggcgataacggtggggctaaccatgaccattttccagtaacatcacgatgatgctgttcctctttttcttcaaataattcaaattgtttagcagcagttaagtggtcaacaatagaaacaccctgtgatttaaaagagtgataaactgcataatttaattctactaatgtacgatctttattaaatgaattatttttaagtgtaccaaattcaaatgtttctgcaactttttcaagcaaattatagcggtaagtatcagtaaaattacgaactgcaatttcagtaaccatgtaccaaccattaaaaggagcagttggatatgtaattccacctattttcaaatccatattagaaataataggaacaccataccattttaaatgtaaatctttcagctttggaaattgattatgttctatatctacttctttaatcaatgaagcaggaaattcatgatattttataggtgaatttggtaattgataaataagaggaagcacgtcaaagtctgaacctttgcctttccatcccaaatgattagctaattgtgttatctcgcgttctgatggatcacctttatcttcatatcctgcgtaacgtattaattgattgttatatattttaggtgcatcagttgaagaaaatatagtgatatatggtttgattttaccgccatttgttgctttgtttaaatgattatgaagcgcatctaagaaatgttgttctgtataactatctcgtgcatccacaacatttaatgattcccaaaataagcgcccgacacatcgattggaattacgccatgccattttagcgccataatttagttcttcataagtatgtgtataggtacctgtccgattgatttctttctctatctcagtgatacgtttagaaatagtatgatttgagtaatttaattcaccatacatagtttggataaaatttgtagcttcttctaatagcatataatcacctcaatagtattataagcgagaaactgatataacacatacaataaatacttgtgtcatgaatttgtcgaattaaaaaaatttaatttttaaattaaagactattatcgaaaatactcactattactgaattgtgataaaatatacaaaaaggttgttaggagagatgaggatgtatcgttacgaagatgatagtttaatgttacataatgacttatatcaaataaatatggcagaaagttactggaatgacggtattcatgaaagaaatgcagtgtttgatttgtatttcagaaatatgccatttggaagtggatatgctgtttttaatgggttaaaaaggatgattcaatttatagaaaacttccattttagtgattctgatatcgaatatttacaatcaataggatataaaaatgattttttaaaatatcttaaaaatttgaaatttacagggaatattcgcgcgatgcaagaaggggaattgtgttttgggaatgaaccattattacgagtagaagcgccattaattcaagctcaacttattgaaacgattttacttaatattgtaaattttcatacgcttattacaacgaaagctagtagaattcgtcaagttgcaccacaagatacgttaatggaatttggtacacgacgtgcacaagaaattgacgccgcagtttggggagcacgtgcagcatatattggtgggtttgattcaacaagtaatgtccgagcaggcaaattatttggtattccagtttccggaactcatgctcatgcactagttcaaacatatggtgatgagtataaagcatttaagatttatgcagaacgacataaaaattgtgtgtttttagtagatacgttccacactttaaaatcaggggtaccaactgcaattaaagttgcaaaagaattaggagattccattaattttataggtataagattagattctggtgacattgcatatttatcgaaaaaagctcgtcgtatgcttgatgatgcaggctttaaagacgcaaaaatcattgcttcaaatgatttagatgagcaaacaattaccagtttaaaggcacagggtgcaaaagtagattcttggggtatagggactaaattgatcacgggttatgatcaaccagccttaggagcagtttataaacttgtcgctgttgaaaataatgaaggtgaatatgtagatcgtatcaagctatcaaataatgcggaaaaagttactacgcctggtaagaaaaaagtatatcgtattattaatactaaaactggcaaggctgaaggtgactatatcacgcttgaacatgaaaatcctaataaagaaaaaccattaaagatgttccatccagttcatacttataaaatgaaacatgttaagcattttgaagcaattgatttacatcattcaattttcgaaaatggtaaattagtttatgacttaccaagtgaaaaagaaactcaagattatttaaaacaatcattatcacaattgtgggaagaaaataaacgttatttaaatccacaagaatatccagtagatttaagcacaagttgttggaataataaacaaaagcgcattcttgaagtgacagaacatgttaaggaaatggaggaagacaatgactaatttacaagatatcgtagtaaaagaaatgaaagtaaagaaacatattgatagtcaacaagaaattcgtgagattatccaattcattaaaaactatgttcaatcacatacatttattgagtcattagtacttggcatatctggtggtcaagattctacacttactggtaaattagcgcaattagcagttgaagaactccgtaaagaaggaagagaatgccaatttatagcagttaaacttccctatggtaaacaaaaggatgctgatgaagtagaagatgcacttcattttattcaacctgatgaagtgattacagttaatattaaaccagcagtagatcaaagtgtagcatcattgaaagaagcgggtattgaacttacagatttccaaagaggaaatgaaaaagcaagagagcgcatgaaagtacaattttctattgcttcaaatcgtagtggtattgttataggaacggaccattcagctgaaaatatcacaggtttttatactaaatatggtgatggtgctgctgacattgcacctatctttggactagataaacgccaaggtagacagcttttagaatatttagaagcgccaacacatttatatgaaaaagtgcctactgctgatttagaagatgataaacctcaattacctgatgaggaagcattaggggtaacttataatcaaattgatgactacttagaaggcaaagaagtaccaagtgatgcaaaaacaacgatagagaatcattatgttaaaaatgcacataaaagagaattagcatatactcgctatacttggcctaaacattcacatacaaaagaataaatgaatactttaataattaaatgatttaattactattagtttttagtgacaaaattatttgtgactgataaaattatttcgaattttagttaaatgaaatgaggaataatatgtcagtaataacgtcaaatccatggataatgatattagcgatattcatcattaacgttttttacgttacatttcttacaatgcgcacaattttaacgttaaaaggatatcgttacatggcagcagtagtgagttttcttgaagttttaatatatgttgttggattagggctagtgatgtctagtttagatcaaattcaaaatattattgcatatgcctttggattctcaataggtatcattgttggaatgaaaattgaagaaaagcttgcattaggctatacagttgtaaacgtaacatctgcagaatacgaccttgatttacctaaagagttacgaaatttaggttatggtgttactcactatgaagcacatggtagagatggaagtcgaatggtaatgcaaattttaacacctagacgttatgaacgaaaattaatggaaactgttcgtagtttagatgaaaaagcatttatcattgcgtatgaacctagagctattcacggtggattctggactaaaggtgttcgaactaagaaagtaaaagcatatgaagtagaagaaatagaaagtgttgtggaacatagtgaagttcaaggtaaatgaaaatgaaactatttcagattgtattgcacgtatgagaaaagaaggatacatgccagtcagacgtattgaaaaacctgtttactttgaagataaacaaggaaatataaagatattacgacaagatattcaatttgttggtaagaaaatagaaaatgacatttaataactgctcatatatgggtctttgacaatttagaagtcagagaccttttaatatttttataaagttcgtaaacctatattcaattagaataaaaaatctttatacttttagtatagaatctgttaaactataaatatagagttaaatacgaactattttacttaaaaatgatttaatgtacagctttttataaaaataattacataagataggagtttaataatgattgaacgttattcaagagaagaaatgtctagtatttggacagaccaaaatagatatgaagcatggttagaagtggagattcttgcttgtgaagcctggagtgaattaggatatattcctaaggacgacgtaaaaaaaattcgtgaaaatgctaaagtggatgtcaatcgtgcaaaagaaattgaacaagaaacacgtcatgatgtagtagcatttacaagacaagtatctgaaacacttggagaagaacgtaaatgggttcattatggattaacttctacagatgttgtggatactgcattaagttatgtaattaaacaagcgaatgaaattattgaaaaagatattgaacgctttattaaagtacttgaagaaaaagctaaaaaatataaatatacattaatgatgggtcgtacacacggtgttcatgctgagccaaccacttttggcgtaaaaatggcattatggtatacagaaatgaaacgtaatttaaaacgttttaaagaggtacgtaaagaaattgaagttgggaaaatgagtggcgcagtaggaacatttgccaatattcctcctgaaattgaaaattacgtttgtaaacatcttggaattgacacagcccctgtatcaactcaaacacttcaacgtgatcgtcacgcttattacattgcaactttagcgttaattgcgacatcattagaaaaatttgctgtagaagttcgtaatttacaaaaaactgaaacgagagaagttgaagaagcatttgcaaaaggtcaaaaaggatcatcagcaatgccgcataaacgtaatccaatcggttcagaaaatattacaggtatttcaagagtgattcgtggttatattacaactgcatatgaaaatgtcccattatggcatgaacgagacatttctcattcttctgcagagcgaattatgttaccagatgtaacaattgcattagattatgctttaaatagatttactaatattatcgaccgtttaacagtatttgaagataatatgagaaataatattaataaaacatttggtcttattttttcacaacgcgttttacttgcattaattaataaaggtatggttcgtgaagaagcatacgataaagtacaacctaaagcgatgaaatcttgggaaactaaaacacctttccgtgaacttatagaacaagattcaaccattacaaatgttttatctaaagaagaattagacgagtgttttgatccaaaacatcatttgaaccaagtcgataccattttcaaacgtgctaatttagaatagttactaatatagttttagcatgttcaattgaaataactacactttaattaattaatgcgttaaaatatagttatatttaatttgaaaataggggttgcttgagatgcaaattgaaaaattaagaggagaagcattggatgaattatttgatgccatcttaacacttaaagatagagaagaatgttatcaattctttgatgatttatgtacagtcaatgaaattcaatctttatctcaaagacttcaagttgctaaaatgataaagcaaggttttacttatgcaactatagaacagaaatctggtgcatcaacagctacgatatctagagttaaacgctcactgcaatggggtaatgatgcgtatacaatgattttagagagattaaatgttgaaacaaaagaataaataaagagagacaattgcttagctaaaaatagcaattgtctcttttttgtgaatataatttttacaatttgtactagtataaacttagtgtatggatttagaattgcaaaggtaaaaatgctataatttagtgtatgttaaaagaaggagttatggataatgtatgacattagaaagtggcagcatgtatttaaacttgatcctgccaaagagattagcgacgaaaatttagaagccttatgtatgtcagatactgatgccatcatgattggtgggacagacgatgtaactgaagataatgtcattcatcttatgagtagagttagaagatatccattacctttagtactagaggtttcaaatttagatagcgtaatgcctggctttgacttttattttataccctcaatattaaatagtaatgatgtgacataccataatggtttgcttcataaagcattaaaacaatatggtcatatgattaattttgaagaagtgatgcttgaagggtatgtcgttcttaatccagatagtaaagtagccaaacttacgcaatcaaatactcagttagatgttgaagatattgaagcttatgctcaactcgttgaagaaatgtataagttgccaattttgtatttagaatatagtggtacatatggagataaagatatcgtaaaagccacttcccaaatgttaacccatacacaattattttatggtggtggtattagttctttaactgaagctaaagaaatgaaaaattatgccgatacaattattgtaggtaatattatatactcagatattaaaaaagctttaaaaactgtaaaaataaagaaggagtcgaaataatgaatgctctagtaagtaatatgaataaagaacaaagtgaagcagttagaacgacagaaggtcctttgcttatcatggctggcgcagggtcaggtaaaacaagggtgttaacacaccgcatagcctacttattagatgaaaaagatgtttctccgtataacattttagctattacgtttactaataaagctgcaaaagaaatgaaagagcgtgtggaacacttggttggtgaagaagctcaagtgatttggatgtcaacattccattcaatgtgtgtaaagattttaagaagagatgcagatcgtattggcattgaacgcaactttaccattattgacccaactgatcaaaaatctgtaattaaagatgtacttaaaaatgaaaatattgatagtaaacgttttgaaccgagaatgtttattggtgccatcagtaatttaaaaaatgaattgaaaacgcccgaagatgcgatgaaagaagcaaatgattttcattcacaaatggttgcaacagtatatagtggataccaacgtcaactatctagaaatgaagcattggattttgatgatttaatcatgaaaacgattcgtttatttgaacgtgtaccagatgcattagaatactatcaaaataaatttcaatacatccatgtagatgagtatcaagatacaaataaagcacaatatacacttgttaaattacttgcaagtaaatttaaaaatttatgtgttgtaggtgattctgatcaatcaatatatggatggcgtggtgcagatattcaaaatatactatctttcgaggaagactatcctgaagcaaagactattttcctagaacaaaattatcgatcaacaaaaaccattttaacagctgcaaatgaagtgattaaacataatactgaacggaaacctaaagggttatggaccgcaaataatggtggagaaaagattaaatattatgaagcgatgactgaacgtgacgaagcagaatatgtagttcgtgaaattattaaacatcgtaagtctggaaaagactataatgatatggcaattttgtatcgaacaaatgcacaatcacgtgtgttagaagaaacatttatgaaatcaaatattccttatacgatggttggtggccaaaagttctatgatcgtaaagaaatcaaagacctgttaagttatttaagaatagtggcaaatagtaatgatgatattagtcttcaaagaattattaatgttcctaaaagagggatagggccatcatcagttgataaaattcaacgatatgcactagataacaatattagtatgtttgatgcattaggagaagtggattttatagggctctctaaaaaagtaactcaagaatgtatacaattttatgaaatggttcaaaacttaattaaagaacaagaatttttagaaattagtgagattgttgaggaaatacttgaaaaatcaggttatcgtcaaatgttagaacgtgaacaaacaattgaatcacgtagtcgtcttgaaaatattgatgaatttatgtctgtacctaaagactatgaaaaagatacacctttagaagaacaatcattgattaactttttaactgatttatcacttgtcgcagatattgacgaagcacaaattgatagtggtgtaacgttaatgaccatgcattctgcaaaaggattagagttcccaattgtattcttaatgggtatggaagaatcacttttccctcatattagagcaattaaaagtgatgatgaccatgagatggaagaagaaagacgaatttgttatgtagccattacacgtgcagaagaagtgttatatattacacatgcgacttctcgtatgttatttggacgttcacaagcaaatctaccatcacgcttcttaaaagaaatccctgaagaattattagaaacaccagcaaaatcaaaacgacaaacaatcacttctaagtcaactacaccgtcaaaacgtggttttagtaaacgtacgacttctactaaaaaacaagtatctgcttcagattggaaggtaggagataaagtgacacataaatcatggggcgaaggtatggtgagcaatgtaagtgaaaaaaatggctctgttgaattagatattatatttaaatctgaaggtcctaagcgtttattagctcaatttgcgcctatcgaaaaaaaggaggattagtaaatggataacattcaaaatcgtgtcaatgaactgcatgatttattaaatcaatatagttacgaatattatgtgaaagataatccttctgtacctgatagtgaatatgataaattattacgtgaattaattgatattgaaaatgcacatcctgaactaaaaactgacgattctccaacagttagggttggtggagaagctcaatcatcatttgaaaaagtaaatcacgaaacacctatgcttagtttaggtaatgcttttaatgaggaagaactaagacgttttgatgaacgtattcgagaacatattggtaacgtggaatatatgtgtgagctaaaaattgatggtttagcagtttctttaaaatatgaagatggacgatttgtgcagggattaacgcgaggagatgggaccacaggagaagatattacagaaaatctacgtactattcatgcgattcctcttaaaattaaagaacctttaaatgttgaagttcgtggagaagcatatatgccacgtcgttcctttatgagattgaatgatgagagagaaaaaaatgaagaacaaccatttgctaatccacgtaatgcagcagcaggttctttaagacaattagatcctaaattagctgctaaacgtaaactaagtgtctttttatatagtgtaaatgattttacagattttagcgctactactcaaagtgatgcattagatgaattagatcgtttagggtttaaaactaatcatgaacgtgcacgcgtagaagatatagagggtgtactagaatatattaaaaagtggactaaacaacgtgaacagctatcttatgatattgatggaattgttattaaagtgaatgatcttgatcaacaagacgaaatgggatttactcaaaaatctccacgttgggcaatcgcttataagtttccagctgaagaggttgtcacagaacttaaagatattgaattaagtataggacgtactggcgtcgttacaccgacagccattttagaacctattcgtgttgcgggtactacagtttcaagagcatcacttcataatgaagatttaattaaagaacgtgatattagaatcggtgatagcgttatagtgaaaaaggctggagatattattcctgaagtcgtaagaagtattattgaccgtcgtccaaatgatgcaaaaccataccatatgccaacgcattgtccaagttgtggtcatgaattagtgcgtattgaaggagaggttgcgcttagatgtatcaatccaaaatgccaagcgcaacttgtggaaggattgattcattttgtttctcgacaagcgatgaatatagacggactaggaaataaaatcattcagcaactgtatcatcatcagcttattaaagatgtaagtgacattttttatttaactaaagaagatttattgcctttagaacgaatgggcacaaaaaaagtagaaaacttattaagcgctatcgaacatgcaaaacaaaattctttagaacatttattatttggtttaggtatacgacatcttggcgccaaagcaagtcaaattttagcagagaaatttgaaaccatggatcgtttacttaaagtaacagaagaagaattggtagcgatccatgatattggagataaattagcacaatctgtagtaacgtatctagataatgaggatattaaagcacttattgaaaaattaaaagataaaaatgtcaacatgacatataaaggtgttaaatcctctgaaattgaaggacatccggaatttcaaaataagactattgttcttactggaaaattacaacaaatgacacgtaaagaagcaacaacatggttagaaatgcaaggtgctaaagtaacaagtagtgtaactaaaagtacagatttagtaatagctggtgaagatgctggctcaaaattgtctaaagctgaacaatttggtacagaaatatggtccgaatcacaatttattgaaaaacaaaatgaaatagcagaatagaggagaacgtaatgaagcggttattattattagttataacgtcgcttatgatattgacagcgtgtggcaatgggaatgataaaaatagtcagtcaaataataagcaacaagaacaaaattcaaataatgtaaaaacagttgccactgatcaagaagttcaaggagataattatcgtacaatcttaccatttaaagaaagccaagctcgtggagtattacaagataatatggctaatagctataatggtgaagatttcgaaaatggtttattacatctaagtaagtctgtatttccaactgataattttttatatcaagatgggcagtatttagacaaaaatacagttaacgcatatttaaatcccaagtattctaaagacgaaattgatcacatgagtgaaagtgaaaaagaatcaaaaaaagctactgaaaatttaggtcttaatccatcacatgatggagaaactaaaccagaaaaaatagcagaaagctctcctgcttatttatctaatatcttagaacaagatttttatgatacaaatgatacaaaaggaaaaaaaattaaaggcataacaattggtcttgctatgaatagtgtctattattatcaaaaagaaaaagatggagaaacatatagcaaatcgctagataataaagaaattgaaaaacaaggtaaagcaatggctcaagagttacttacacgccttagagcaaataaagatttgaaaaatattccaattcactttgcaatatatgttcaatcgagtcaagatgcaattacgccaggacactttattgctaatacgattgttgatgataaacaaactaaaattaataaatggaataaaattgatgagatttcagcacttttaccttcaacagaagcagaaaaatatgacaaaaatctaaataataactttaaacaatttaatgacgatcttcaatcttatttctctaattttactcaagcaattggaaaagtgaaatttgtagataagaaacctaatagactagtgattgatttgccaatcgattactatggtcaagctgaaacaataggaattacacaatatgtaacagaacaagctaagaaatattttgataatatagatagttacgaaattcgtataaaagatggtaacaattcaagagcacttattagtaaaacaaaagatgacaaagacccacaagtccatatttatagtaattaattaaaaagaggttgtgacacgtcgtgtcgcagcctctttttaattttcaataaattaatttatttttcgcgaacaattgttttaacttgatttaactgttgttcaatagaatagtctgatttataggtgaagatgctaacaaggtatgtaacgattacactactaataaaaccaggtataatttcatacatgccaaatagttcattaatattagcaagtggtttaacccagacaatccaaataatgactacgagagctccagcaatcataccacttatcgcaccctcacgtgttagttttttccaatataaagaaaaaagaacaagtgggctaaatgctgcaccaaaacctgcccaagcatttccgactaggtttaatatggtgtcattaggagaccatgcaatagcaagagctacaatggctacagctaacacagacaatctgcctaccagtacaaattctttttgatgtgattgagcatgttcttcaccgcgaatgagcttatagaaatcttctgtaagtgagcttgaagtcactaataattgtgaagaaattgtactcataatagcagctagaatggcagcaagtaagaatccacctactaaaggatggaaaagaacttggctcatgataataaataatgtttctggatcgtccattttaatatgatttttcgaaataaaagcaattcctgttaaccctacacccacagttccaagtaaacctacagtcatccaacttattcctaagcgtcgtgctttaggtaaaagtttgtgagatttaatagacataaatcgtacaataatatgaggctgaccaaaataacctaatccccatgcaaataatgaaatcatacctaaaaaagtagtacctctaaataaatccatattagttggtttcatttcagctacttgatggaatgtatcccatccactaagttgcatcaaagcaactattggtaccattaccattgcgataagcatgataaccccttggaaaaagtcagtaatagaaacagctaaatatcctccgaaaaaagtatataaaatgacgataattgcgactgaaatcagtcccaaatgataatttaatccaaatgcgctttcgaataatttacctccagaaacaaaaccagagtgcgtatataaagtgaaaaaaacaacaataataagaccagaaataattttaatgatattatgtttatcattaagacgatttttgaaaaaattagggagcgtaattgcatctccagcaacttctgtatatactctaagccttggtgcaacaacgagatagttaacataggcaccaatagttaaaccaattgtaatccatattgccgataaacctgtgctataaactgaccctggaagtcccataatcatccaaccactcatatctgaagcaccggctgataaagcagtaatatatgggcctatatttctcccacctaacatatactcacttaaattgccagttgcctgtttataaccatagtaaccaatcactagcagaataataaaatagattgcaatcataatataagtctgccagtttgtgttagcatgagtgcctaaatttacacctaatacaaacattgtaattaccccctttaaaacttttaaatttatgtttttcaacaacattgtactgaaaaaaagaagtgacgatttttaaattagttacgtgtaatattatacatatttatagattagagaagtaaaattttatctataaataacagtttattttaatgtaattataagcgttaacaagaattagagtatagataaaaaataattcattttattatataacgttaatattaataaattattaatagaaattaatgtatatttataggtaactatgtaaatgagttacataagaaagttgttttaattcttaactttgctaagaatagttaatacaccgagtatcataataaatatttagatttttaactgaaaatttgatacaattttatgatgaatgagtaataaggaggcttttttaataatgactaaagttacacgcgaagaagttgaacatatagcacatttagcaagacttcaaatttctcctgaagaaactgaagaaatggctaatacacttgaaagtatcttagattttgcaaaacaaaacgattcagcagatactgaaggtgtggaaccaacatatcatgtcttagatttacaaaatgtgttacgtgatgataaagcaatcgagggtattcctcaagaacttgcattaaaaaatgcgaaagaaacagaagacggtcaatttaaagtaccagctatcatgaatgaggaggacgcttaagatgagtattcgctatgaatctgttgaaacactttcagaaatgattaagaataaagaaattaaaccttctgaagtagttaaagatatttatgatgctattgaagaaacagatccaacaattaaatcatttttagctttagataaagaaaatgcaattaaaaaagctaaagaattagatgagttacaagctaaagatcaatttgaaggtaaattatttggaatcccaatgggaattaaagataatattattactaaagatgtcgaaacaacttgtgcaagtaaaatgttagaaggttttgtaccgatttatgaatcaacagtgatgaataaattacatcaagaaaacgcagtgttaattggtaaattaaatatggatgaatttgcaatgggtggttctacagaaacatcttatttcaaaaaaactgtaaatccatttgatcatcaagcagttccagggggatcttctggaggttcagctgcagcagtagcagcaggattagtaccatttagtttaggttctgatactggtggatcaatcagacaaccagctgcatattgtggtgtagtaggtatgaaacctacatatggccgtgtatcacgttttggtttagttgcatttgcatcttcattagatcaaattggaccaattactcgtaatgtcaaagataatgcgatggtattagaagcaattgcaggcgcagacaaaaatgactctacaagtgcaccggttgaagatgttgattttacttctgaaattggtaaagacatcaaaggtcttaaaattgcacttcctaaagaatacttaggagaaggtgttaacgaggaagtaaaaacttctgtaaaacaagcagtagaaacattaaaatcacttggtgcagaagttgatgaagtgtcattaccaaatactaaatatggtattccttcttattatgtaatcgcatcgtctgaagcatctgcaaatttagcacgtttcgatggtattcgttatggctaccattcaaaagaagcacaaacattagaagaattatacaaaatgtctcgttctgaaggctttggagacgaagttaaacgtcgtatcttcttaggtacattcgcattaagttctggttattatgatgcattttataataaatctcaaaaagttagaacattaattaaaaatgacttcgataaagtattcgaaaattatgatgttgttgtagggcctacagctccaacaacggcgtttaatttaggcgaagaaattgatgatcctttaacaatgtatgcaaatgacttattaactacgcctgttaacttagctggtttacctggtatttctgtgccatgtggccaatcaaacggacgtccaatcggtttacaatttattggtaaaccatttgatgagaaaacattatatcgtgtggcatatcaatatgaaacacaatttaacttacacgacgcatacgaaaaattataaggagtggaaataatgcattttgaaacagttatcggacttgaagttcacgttgaattaaaaacagactcaaaaatgttctctccatcaccagcacattttggggctgaacctaactcaaacactaatgttattgatttagcttatccgggtgttttacctgttgtaaatagaagagcagtagattgggcgatgcgtgcgtcaatggctctaaatatggatattgctacaaattctaaatttgatcgcaaaaactatttttatccagataatccgaaagcatatcaaatttctcaatttgatcaaccaatcggtgaaaatggatatattgatattgaagttgatggtgaaacgaaacgtattggtattactcgtcttcatatggaagaagacgcaggtaaatcaactcataaagatggttactctttagtagacttaaaccgtcaaggtacaccattaatagagattgtatctgaaccagatattcgttctcctaaagaggcatatgcttatttagaaaaattacgttcaattatccaatatactggtgtctctgattgtaaaatggaagaaggttcactacgttgtgacgctaatatttcattacgtccttacggtcaaaaagaattcggtactaaaactgaattgaaaaatctaaactcatttaactatgtgagaaaaggtttagaatatgaagaaaaacgtcaagaagaagaattattaaatggtggtacgattggtcaagaaacacgtcgttttgatgaatcaacgggtaaaactattttaatgcgtgttaaagaaggttctgatgattatcgttacttcccagaaccagatattgtacctctatatgtcgatgatgagtggaaagaacgtgtgcgacaaaccattccagaattgcctgacgaacgtaaagctaaatatgttaatgaattaggcttacctgaatatgatgcgcatgtattaacacttactaaagaaatgtctgatttctttgaaggtgcgattgaacatggtgcagatgttaaactaacatctaactggttgatgggtggcgttaatgaatatcttaataaaaatcaagtagatttagaagatacaaaattaactcctgaaaatcttgctggaatgattaagcttatcgaagatggaacaatgagtagtaaaattgccaaaaaagtattcccagaattagctgaaaatggtggagaagctaaacaaattatggaagataaaggtttagttcaaatttcagatgaagctacattattaaaatttgttaatgaagctttagataataatccacaatctgttgaagattataaaaatggtaaagggaaagctatgggcttcttagtgggtcaaattatgaaagcttcaaaaggtcaagctaatcctcaaaaagtcaatcaattattaaaacaagaattggataaaagataatagctcatctcatatgaggtattaaatataagtttaagctaaactgttcacaaagcgtttaagattgtgaacagtttttttattcatatttctagagaaaaggctattggatttcaataggatagataagcgcagtatttagtttgttcctagtgtcaaaagaatgagatatgctttacgtcggttagtttcttacaacaattgtacaacaaaatgatacccacaaaaatttaaaagaattggtataaatacttttaactcattcataaatcatttaatatagtgttatgtaaaaaaaagtagagggatcacttatgagaaaacgagcaagaatcatttataatccaacttctggaaaggagctatttaaacgtactttaccagatgttttaataaaattagaacgtgcaggttatgaaacaagtgcttatgcaactgaacgagaaggagatgctacacttgaagcggaacgtgcacttgaacaaaactatgatattattatagccgctggtggtgatggcactttaaatgaagttgtaaatggaattgctgaacaacccaatagacctaaattaggtattatacctatgggtacagtgaatgattttggacgagctttacatttaccaaatgatattatgggtgcagtagatgttattattaaaggtcatatgacaaaagtagatatcggaaaaatgaataaccgatattttataaatttagctgctggaggtaagctcacgcaagtatcctatgaaacacctagtcgcttaaaatctattgttggaccttttgcttattatataaaagggttcgaaatgttgccgcaaatgaaggcagtcgatttgagaattgaatatgataatgaagtattccaaggggaagcactgttattcttactagggcttaccaattcaatggcaggctttgaaaaactcgtacctgatgctaagttagacgatgggtattatactttaattatcgttgagaaagcaaacttagctgaattaggccatatcatgacattagcttctagaggtgaacataccaaacatcctaaagtaatatataaaaaagcaaaatcaattaatatttcatcatttacagatatgcaattaaatgtagatggagaatatggtggtaaattacctgcaaactttttaaatttaaaacagcatattgaagtttgtacgcctaaagatatttataatagtgagctctcagaaaataattaaagtatttaagaaataaacggattagggaaaatgaaataagaagttaaaaagaggttatctataatttcgggtttgaaaaggtaagaagttatacgtacctctttttcatatggagtgaaaaaataattgtgatgattaataaaaatgatgtaataaaaggaaaagtgatcgatttaacacatgaaggacatggtgtgattaaattagatcgttatcctatttttgttcctaatgtgttaattgatgaagaagtagaatttaaggtaattaaagtaaagaaaaactttgctattggtaaactaataaaagtactaaaacaaagtgagcaaagagtaatacctccttgtatatattatgagaaatgtggaggatgccagttacaacacatgtcttatgaatctcagctaaaaatgaaaaaacaacaagttgtgaatttatttcataaaaaggcgaaattagaggaaacagtgattcatgatactattggtatggattatccatggcgatatagaaataaatcccagcttcctgtaggtaaagataaaaataataaaacgataatgggatattaccgtcaaagaagtcatgacatcattgatatggatagttgtttaattcaagatgaaaaacaacaagaactaatgaatgatataaaacagtggttaaatgaattgaatgtaagcatttataatgaaaaaaataaaaaagggttattacgtcatgtagtcattcgaacaagtcgttatacaaatgaagttatgattatatttgtaacaaatggttctaaatttaaagaagctgaaaccctagtacatagactaacagagttatatcctaacataacaagtattaaacaaaatattaataattcacattcaaatgtcataatgggtaagcaatcgatgactttatatggaaaagataaaattacagatcagttaagtgaaactatttttgaaattagtgatcaatcgttttatcaaattaattctgttcaaacagaaaaattatatcagaaagctatcgactatgctcaattaagtggaaatgaaattgttttagatacatattgtggtataggaacgattgggctttacatggcaccagtggctaaacatgtatatggtgtcgaaattgtgccatcagccattcaagatgccaaacaaaatgctttaattaatcattttgataatacaacgttcgaatgtggtaaagcagaagaagtgataattgaatggaaacaaaaaggaatagaacctgatgttatcatggtcgatcctccacgaaaaggatgcgatcaagtctttatagaaacattattagagttagcccctaaacgtattatctatatttcatgtaatccttcaacacaacaaagagatgctcagcttttagctaatctatattatttaaaagaaataacaccagtcgatatgtttccacatacaacacatattgaaactgtggccttattcgaaagaaaaacattgtaattaaattaaagtaaatgaggagaagtttattaaaataagattacaaagggtttaagttatgtataatcgctttcattctaacacttctacatgtatactatggaagagttttagcgaaatgggtggaggttgacagatgcacaaaattgatttatcacacaatcgaatcaaaatatcaaaattacttaccattcaagttgttatgatgttatttgcaattttagttacatataagtgggcaattaattatgttgatattattgaacaacgttttttgacaaatgtcatttatggaatacttggttttattggagtattaattattcacgaattaatacataagtatttattttttatcttttctaaaggacagaaaccacaatttaaatataaaaatggaattttgctcatttatttgtcatctaaatactttaataaatggcaattttgtgcagtcatgcttgcgccattagtaatcattacaatagggttaatgctttcattttatcactttgcttactcttctattatatttatatcaagcatacacatcgggtattgtttgattgatatttatctagcaactataacaattattaacaaatttaaatatattcgttctactgatgaaggtatctttatgtatcattatttgcctatatctataaataatgactatgattaaacatctgtataagtcttaatattattataaatgcatttataaagtgttttcttttagggtgcagtataatagtattggggcttattttatttaaaaaggagtgagacaatgacagaaaggagaatcgttcatattgatatggattgtttctacgctcaagtagaaatgagagataatcctaaattacaaggaaaacctgtcattgtaggtggaaaagcaagtcatcgaggcgtcgtttcaactgcttcatatgaagcacgtaaatatggtgttcattcagcaatgcctatgtcgcaagcacataaactatgtccaaatgggtactatgttagagcaagatttgatgtatatcgtgaagtttcaagcaagataatggaaatttttaaacagtatactgagattgtagaacctttagcactagatgaagcatatttagatattactcatttagttaaaccacatagatcagcatcaaaaattgcttcaaacatacgtaaagatatctttaacaaaacaggtttaacgtcttctgctggtgtttcttataataagtatttagctaaattagctagtggaatgaataagcctaatggaatgatggttattcattatgagaatgtgcatgacatattaatgaacttagatataggcgattttccaggcgttggaaaagcttctaaaaaaatcatgcatgaacatgatatttatactggtaaagatttatatagcaaatcggaatttgaattgattcgctggtttggaaaaaaaggacgaggactttatcaaaaagtaagaggaattgatgatagtgaagtaaaggcaagtaggattcgtaagtcagtaggaacagaacgtactttttcaacagatattaatgatgatgaagcgattctacaaaaaatatgggaactttctggtaaaacatctgaacgattaactcaattgcaaaagtctggcacaacagttactgtcaaaattaaaacgcatcgctttgaaacatattctaaacaaagaagtttgagagaagcggtaagtaaagacatcgatatttataatatagcttatgatttatatcatgaattaaaagaccctgatgtacctatcagattaattggtgttacagtaggtcatctagagcaatcaacatatcaaaatatgaccatttatgatttcatttaaagatagagatagataagacgttttaaattacctatttctatcttttaaatttttaccatgaaattgaagcacactttgtaagctatcatagtgttttaataatctataagtaatcattgcgcaagcttttgcgtcatttagggcatcatgatgaccatgaaaatttaagttgtaatggttcattagatgttttaatccatatcgataagctttgatcgtacgtctagcaagttgatacgagcagaaataggtaagtgagggaacagctatgtttaaatgttttaagctttgatgtaatacacccatatcaaaagcagcattatgtgccactacgggtaattgatttataaattgcaacatatatggaaagacttctttaaaatctggcgcatctttaacgtccttaggatgaataccatgaacatgaatatgtgtttctgaaaaatagtcatgaggattaacaagcgtgtaaaacgtttcgactatttcgttatctactacttttaccatgccaacagaacaaatacttgttctttttttatttgcagtttcaaaatccaaagctataaatgaatttttaaccattctatattcctttctaaatacttaaattgaattattcacagtttaacagaaagtacggtttaaatataaataattgctttttttcataatctataaataacaaagtaaaaaaatagatacggaatttaaagtgaaaaagttataattagaagtgtatttagttacttttaattgagaatattttttgttattttagatacatggtataattactcgagtgaattatgcgaggaggaaagacatgagacaatggacagcaacacacttggctaaattagcacgcaagataagtatcgcagcaggaaaaaaaggaactgatttaccaggtcaaattgctcgcaaagtagatcaaaatattttacgaaagttagcttcacaagttgatgatattgtttttatcagtggaacaaatgggaaaacaacaacttccaatttgattgggcacactttaaaagcaaataatattgaaattatacataataatgaaggtgctaacatggctgctggaattacctcggcattcatcatgaaaaatgtaaaaggtattaaagtagcggttattgaaattgatgagggttcaattccaaaagtattaaaagaagttacaccttcaatgatggtatttactaatttctttcgcgaccaaatggatcgatttggtgaaattgatattatggttaataatattgcaaaatcaattagtaataaagggattaaattaattttaaatgccgatgatccatttgtaagtcgtttgaaaatagcgagtgatacaattgtatattacggaatgaaagctcatgcacatgaatttgaacaaagtactatgaatgaaagtaaatattgtccgaattgtggtagattattaacttatgattatacccattataatcaattaggacattatcattgtgaatgtggatttaagcgtgaaacacctaaatatgaggtttcacaatttgaggtacagccatttattgatatggatgtgaacgatgcacactttgaaatgaaaattgctggtgattttaatgcttttaatgcacttgctgcatattcagtattaaaagaattaggcttaaataatgatgcaattcgtaaaggatttaacacatacacttcaaataatggccgaatgcaatactttaaacgtggtcaaaaagaagcaatgattaatttagctaaaaatcctgctggcatgaatgtgagtctatcagtcggagatcaacttaaagaaaaaaaagtatatgttatcagtctgaatgataatgcagctgatggcagagatacatcttggatttacgatgcagattttgaaaagttacgtaatcaaaatatagaaaaaattattgtaacgggtacaagagcagaagaattacaacttagactgaaattagctgaagtagatgttccaattattttagagaaagatatttataaagctacagctttaactatgaattatgcaggctttacagtagcgattccaaattatacgtcactttcacctatgttagaacaacttaatcgctcatttgcaggaggacgttagatatgtacgaattaacagtttttcattttatgtcggacaaattaaatttatatagtgatataggaaatattattgctttaaaacagagagcaaaaaaacgcaatattaatttaaaagttatcgaaattaatgaaactgagggagttacattagaaaattgcgatattttctttattggtgggggtagtgatagagaacaaagtatcgctactaaagagttaagtaaaattaaaacaatattaaaagatgcaatagaagatggaatgccaggtttaaccatttgtggtggatatcaatttttaggtactaaatatattacccctgatggtacagagttagaaggacttggaattttggacttttatacaaaatcaaaaacagatcgtttaacaggggatatcgtaattaaaagtgatacatttggaacaatagtaggttttgaaaatcacggtggtcgtacatatcataattttgatacattggggcatgtagtaacagggtatggaaataatgatgatgataaaaaagaaggtattcattataaaaacttattaggaacttacctgcatggccctatattaccgaaaaatcatgaacttactgattatttattagagaaggcatgtgaacgtaaagggattccatttacacctaaacagttagataatactgaagaagaagctgcgaaatatgttattattgaacgttcagaaaaataaaaaaacgttggatgaattgaattatttcaattcatccaacttttttatgctttaacaaatcgattatctagtaaattatagataagtaaaatttcataaataacatgactcttaatttgattcttatcgaattcttctaatattttgactgatgattttaaagtagatacagacttagattctcttttaaaaactccatctaaaggaatattgttgatactattactaatttttataattgccattttttcctcagtagtaaaacaaatatttacgttttttggtaaataaataatatttgataaatgtgtagcaagaagtctatcaatatatgctctatttgacatgttttttaattgtttccatttatcttcgttatttttatgatagcgtaattcatctcgttgataattcattaaagtatctgtttttttatccatatcagataaggttgctaatgaaatattactattatctgaatcaaattttcctaataataattcatgacatctagaagcgaatagttcatacaatttattttctgaatgaattaagttctcttcgatttgatgataatatttaggtggtaatacgaaaaaatttactaatccagcagttactaggccaattaaagctgttaagagtcttgagaaaaaattaaaaagataggcttcatgaataccaggtatcatagcaactgaagttaatactgcaacagttgtaccaacttggagatttaatttcgtacacgctaaaatagtgaaaatagcactaaaggtgtaagtaaatggagattgatcgccgaagatatacgtaaaaataactgcaaataatgcacctatgacagtagcaggaagtcgacgataaccttttcgtaaagaagctttagcagttggttcaatcgaaacaattgctgttaaaatagcaaatataggagttaagtttaatagtaaacaaaataaagttgttagaaaagtagctagccccgtttttattgttctagcgcctataatatgtttataccattgattcatattgttaaatcctctcaaagaatgaacgtgatgattataatgttagaataagtttaatatcaagcttgatgtagtgagacatcaagtcagtagatagtacatttcttatttagtatatcaaaaaatttttggtataataaggtggaatattttttaaaaaggaacgggataatatgattgtaaaaacagatgaagaattacaagcgttaaaagaaataggatatatatgtgcgaaagtgcgagatacaatgcaagaagcaactaaacctggtattactacaaaagaattagataatatcgctaaagaattatttgaagaacatggtgcaatctcagcacctattcatgatgaaaaattcccaggtcaaacttgtattagtgttaatgaagaagtagctcatggcatacctggcaaacgtgttattcgtgaaggggatttagttaatatagatgtttcagcattaaaaaatggatattatgcagatactggcatttcttttgtagtaggagaagcggataatcctttaaaacaaaaagtatgtgatgtagcacttgaagcatttgatgcagcaatggctaaagtaaaaccaggtacaaaattaagtaacattggtaaggcagtccacgctacagcacgtaaaaatgatttaactgttattaagaatttaacaggtcatggtgtaggacaatctttacatgaagcgccaagtcatgttatgaattattatgatcctaaagataagacgcttttaaaagaaggcgtagtcattgcagtagaaccttttatttcgtctaaagcaacttttgttactgaaggtaaaaacgattgggcatttgaaactaaagataaaagttttgtagctcaaattgaacatactgtcattgttactaaagacggtccgattctaacaacaaaaattgattaagaaaaaagagttggatagaattcaaaacgaattctatccaacttctttttatgaccaacgttgttctactttgccaaatttccaaataagtgtagaaataagccatgtaattaagaataaagctaccaagatgtagcctaaataatcaaattgaatcgactgaattatattccaaaacgtacctttaaggtgaagtttatcttccataatttgaagtaattcaattaatccaataattaatgccgcaattactgaaatggctgtaattgtaatattgtagtaaattttgcgtataggattaaagaaagcccaattataggcagatttcataataatgccatcgagtgtatctaataagctcattcctgctgcaaataaaataggcagagataaaatgcctaaaaacgaaatggattgttgagaagctcctgatgaaagtgcaagaagagcgatttcacttgcagtatcaaaacctaaaccaaataagaaacctaaaggtaagacatgccaactacggctaatcaatttaaaataaggagcaataaagcgagtaataaaaccacgtgattccaatagtgcatctaattcttcttctcgtatatgttcattacgtaatcgagcaaaaagctttattaatgaaattagaataaataaatttaatattccaataagaagtaaaaagaatccagacactaatgtccctataataccgcctatattttgaaaatatggaagttcatctttagcccattttactgaaattcctagaagaacagacattaaaaacacaacagttgagtgacctatagagaagtaaaacccaactccaacaggatttcgtttttgttgaagtaacttgcggactgtattatcaatagcagcaatatgatctgcatcgaaagcatgacgcaatccaagagtatatgctaaaattcccataccaaataataaatgattagtattagcaataaataaaaaactaaagccgataatgtgaagtaaaataactattacaatatatggaagccaacttaaatctctctttttaattgtattcaactcatatgacctactttctaactaaatatacattattatatgctaattttgatgaataatgaattgatttaactataaatttaatttagcgctatttatttatagcatattcttcaataaattaaaattaatcgtacttaagtatgagaagaaaatggttcctaggactatattaagtaagattaaactcatttataataaagtttaatcaacaacgaggtggttctatgaattatttagatttatatttacaacactttttaaaaataattataaaaaataatatcaatgattatcgctcattattagatgataagcttcaaaatatggagcgatatataaaatatttaaaaaataaaaaagcaaaaatgaatacattaattgacagtttatctgctacactagaaaataagtatattgatatgataaatatgtataatataaaaaatgcgcaagaagtccataattatgaaatagatttattaaaacaacgtttagataaatttgaagcatactatgcaaaaattgaagctaatattcatcgttgtacgaaagaacgaattgctacagaagaacaatatgcaatgattgaacaaatgagttatgtagcttaattaaaatcaggagggacacattgacacgtaaatatatatctactgaattattaattatttttacagcgctaatgattatcgctaacttttattacatcttttttgaaaaaattggatatttatttattttattattagggtgtatattaatttatgtaggatacctttactttcataaagtaagagggttattagcgttttggataggagcactactcatagcgtttaccttgttatccaacaaatatacgattattattttatttatatttttagtaataatcattattagatacttagtttttaaatttaaacctttgaagattgcggcgtcggaagaagaagtgacctctcctcaatttattaaacaacgttggctaggtgaacaacgcactccagtatatgtatataaatgggaagatgtgcaaattcaacatggggttggagatattcatattgatatgacaaaagcagcaaatatcaaagaaaataatacgattgtagttagacatattttaggtaaagtacaactgattgttccagttaattataatattaatcttcacatggcagcattttatggtacagcttatataaatggagaagcatataaagtagaaaataatcatgtccaagtagaagaaaaacctaaagaagaaaattatagtgtaaatatatatgtatcaacatttattggtgatgttgaggtgatttatcgatgaatcactatttaagagcaataggatccatgcttattttagtgtatagcatgctaactgcgtttttatttatagataaagtttttgtaaatattatatattttcaaggaatgttctatactcaaatatttggtatacctgtgtttctatttcttaatttagtgattattttactttgtattatcgttggctctgtattagcttataaaataaatcagcaaaatgattggataaagaatcaaattgaacatgccattgaaggcgaaacggtagggattaatgataaaaatatagaactatataatgagacaattgatatttatcaaatgttagtgcctttaaatcaagaattacagagattaagaattaaaactcaaaatttaacaaatgaaaactataatatgaatgacattaaagttaaaaaaatcatagaagatgagcgtcagcgtttagcaagggaactacacgattcagtaagtcaacaacttttcgcagcaagtatgatgctatcagcgataaaagaaacagaactagcaccacctcttaatcaacaaattccagtacttgagaaaatgatacaagaatctcaattagagatgcgagcgctattactacatttgcgacctttaggactcaaagataaatcattaggggaaggtattaaagatttagtcattgatttacaaaagaaagtacctatgaaagtcatttatgatatacaagattttaaagttcctaaaggaattgaagatcatctatttcgaattacacaagaggcaatttcaaatacattaagacattctaatggaactaaagtgacagtagaattatttaatcatcaagattatttattattaagaattcaggataatggtaaaggttttaacgtagatgaaaaagtagaacaaagttatggattgaaaaatatgagagaacgtgcattagaaataggtgcaacgtttcatatcgtatctttaccagattcaggaactagaatagaggtaaaagcacctttaacgaaagaggagggttaatatgacgattaaagtattatttgtagatgatcatgaaatggttagaattggtatttcaagttatttatctactcaatctgatattgaagtagtaggggaaggatcatcaggaaaagaggcaatcgaaaaagcacatacgttaaatcctgatttaattttaatggatttgttaatgaatgatatggacggtgtagaagcgacgacacaaataaaaaaagatttgcctcacatcaaagtagtcatgttaacaagttttatagaagataaagaagtatatagggcacttgatgcaggggttgatagttatatattaaaaacgacaagtgcaagtgatattgcagaagcagttagaaaaacatatcgtggagaatctgtatttgagccagaagttttagtaaaaatgagaaatagaatgaagaagaaagcagaattatatgaaatgctcactgaacgtgaaatggaaatattgttattaattgctaaaggctattctaatcaagaaattgccagtgcttcacatattacaattaaaacagtaaaaacacatgtgagtaatattttaagtaaactagaggtacaagatagaacacaagcggttatttatgcattccaacataatttaattcaataataaaaaagctccttataaagaggtctaaaaatgactatctcataaggagttttttcgttagatattttcttttctatagctatttattattatctttatcaaatttatctttaattttatcaacaaaagattcttgttcactatgtttatcatttggtgtaggatccacatcataatttttttcatatttagatgatgctgtagaatcgtattcatattttgtattttcattgtagtgattttcattattatcatcatgttttaaggcagcttcttcaggtgtagaacctttaataacatgtctttggtggataactgcattaatttcagcaccaataataataataaaacatgtaatataaatccatagtaataaaatgatgattccagcaagactaccatatgttttagaatagttgccaaagttagataaataccaaccaaatgcaaatgatcctaataaccatacaatagaagtaaagattgcgccaggatatacagatttaaacttagttttaacgttaggtgctactgaatataatgttaagaataaaataataataacaataagtggtaacaatatacgcactaaatcaaatatccaagcgacttgttgatctaaacctaacggaccaaatagatgatctttaataaaattaccaaatgtaggtaatgttagagctatagctaatacaatagccataacaattgtaaacaaaatgcttaataatttaagaacaataggattacgagcatcttcaacgtcataagcaacattgaatgaattcataattgctgtcataccatttgatgctgaccaaatagctaaaatcaaaccaactgataataagctaccactagagttacttgtaatatctttaaaaattttagtaacaacgtcagcagtctcggcaggagcattttgactaactaagtctttaatttgctgaggatcaatttggaataatggtaataaagttaataaaaagattaacattgggaataaagctaatacaaagtgatacgtcatttgagccgctaaacctgaagcatcatctttaccaatacgataaataagataagataaaaaattagaatttttagtgtattttgcaggtttattcaatctagaaacgaaaaaaacttgtttatcttttttaggcttctttgattgaaattcctgaggttctacgtatgtacgatcaacctttattttctctttattttctgtctctttttccttaatagagttaaggtacttagagtttgattgatttttttttgacatagacgtctccttaaaaattaattctaaaataaaggcaaaactacctaagtaaaaaggaattttgcctttattttctgtcaattatatttgattagctaagacgattgtttttacgatttacaaatgtatctttagcatctttaattgatttttctaattctggattattacgacgaatttcttcgatcgtatctttccaatacaatacttcatttttaattgaagtaattttagaaggtttacgagaacgattaccttctttaatgtctttgaatgattgtactaatgcattgcgtgttgatttatctgctaaagtagcagctccaccaacgatagcaccaataataatacctggaacaaatttgttttccattttagttacccctctttcaaattagcatctttaacgatgaaatctattaaattgtcacaagatgattgtaccatgtcatatacaccttcaaaattatttgtgtaataaggatcaggcacatcagtctcttccatgttactaaattctagcaatttgaacaattgacctttaagattgggattaattgatttaatattatccacattactttggtccatagcgataatataatcaaaatcatcatccggttcaaataattcactaacaataccatcaaaaggtatatggtgttgtttcagaattttttgagtaccttgatgaggaggttcacctaaattccaacgtccagtacccctagaatgtacaataacatcagaaataccgcgttcttttaatcgttgacgcatgattgcttcagccattgtagaacgacaaatatttccaagacatacaaaagctacatctatcatcttgtactcctccaaactttaatatataaactattttatagttatttttaacatttataaagtcataattttactaatttctataaaagtttaataaatttttatactttgataaaatatgataataaagaggtgaaacaaatggcacagaataatgaacaaatgattaaaaatattcgaaaaaaattaaatattgtaaatcaatctttaattaatccagaaaaatttaaagatacagatacaaaggatattaaagatattcatgattttgttatgtctaaagattcattttcaccaagtgaaattacagcaattgctgatgaattaggtaatttacgtcacgagtaaggagaatttaaatggccaatcaagattatcaagacaaattaaaacaatatgcagaattattagtaaaagtaggtatgaacgttcaacaaaatcagcctgtatttatcagaacatctgtagaaactatagatttaacgcgcttaattgtcgaagtagcctatcaagaaggcgcttcagatgtaagagtggtatatacagatcctattttagaacgcttaaaatatgaaaatgaagctgttgattattttgaaaatcatgctgttaaagcttatgatgttgaagagcgtatggattatgctcgtagaggagcagcgaatttagcacttatttccggtgatccagatttattaaatggcattgatgcagaaaaattaaaagcgtctcagtttaattatggacaagcattcaaagggtatatggaaggtagccaaaaaaatgcatttccatgggtagtagctgcatttccatctaaagcatgggcaaaacgtgtatatcctaatttgcctgaagaagaagcatacagtcaatttatcgatgaagtattcgaaattgtacgtgtggatggaaatgacccaataacaaattgggagcaacatgtgaaatctctaagtgtacatgcaaataaacttcaagaaaaaaattataaggcattacattatatgtctgaaggcactgatttaacagtaggactaccaaaaggacatatttgggaagatgcaacaagctatgtaaatggaaatcaacaaccatttattgctaatatcccaacggaagaagtatttactgcaccagatagaaatcatgtagatggctatgtaactaataaattaccattaagttataatggtaatattattgatggattcactttaacatttaaaaatggtgaaattatcgatgttaaagcagaaaagggtgaagaagttttaaaagatttaattagcacagatgaaggctctaagcgattaggagaagttgctctagttccagatgattcgccaatttcaaatcgtaatactatcttttataatactctatttgatgaaaatgcatcttgtcatcttgctattggttcagcctacgggtttaatattaaaggtggcacagaaatgtctactgaagaaaaaatagcaagtgggttaaatgattctaatattcatgtggattttatgattggaagttcagatctaacgatatatggtattttacaagacggctctaaagaattagttttcgaaaatgggaattgggcacaatgactcatttaaattaggaataggagaaataaagtatgtcaaattctcaagttaataaaaaatctatgtctgaatcaaaaagtattaaaacacgacaagtatttcctcaagatactaaccatcaccatacaatgtttggtggatcattgatggctaatattgatgaaatagctgcaattacagctatgaaacatgcgaatgcacaagtggttactgcttctaccgactcggtggattttttaaggcctataaaaacaggggatattacgtcttatgaagcaatggtaagttatgcaggatcaagttcaatggaaatttgtgtgcaaattattattgaagatgtgctaaataaggaaaggcatttagcagcattgagctttttaacatttgttgccctagatgaaaatggaaaaccaacacgtattcctaaggtgtaccctgaaacaaaaatagaaaagtggttctatgaaggggcaccaaaacgtgttcaacgaagaaaagaacgacgcgaagacagtaaaagaacgattgaatttttatctgaagtacagcacatagaaaatatttaggatttataataaatgtcaatacatatgatataaattatatgtattggcattaaatgatacgaaagagccttagagtcttgtttttttaaaaaaatatttcaatgtaaaattacatataaatacaaagtattttggcgagactcttgagacaataggataagctgaagactacaggctgaagctatcccctaagaaagcgagccaacaatacgcaatattataaagaaagaagccagtaaatgaatttataataaactcatttactggctattttgctaggaattatgtcccagtttcttttaattttattgaaaactatgttcagtgtgcattgcgatttcattttctctaaagtttgtatttggataatacatatttttaactaatacatttggtcctaaacattggaaagcttcacaatgacaatttaaagattttgctaaatctgttgataaccaagcatcaaatacatctgtgagcttatcatttttaatattagaaattgttccgttttcatcaccaaaatctgttacaataacgtccccactaaatacatttacatttaagcgactacggccatctgggtcatttcgaacagtaacatttttttcatttcttaatcgttcaagtaaaacttggtcattttcatcgtttatgcaaggatagattgggagagtaccaaataacatccaagtatttttatcacgaatgtctaataaatgatgaatagcttgcttcatgtcttttaatgataatacattaagttgacttgcaaaatctgctggatacataggatgaacttcatgacgactacacttcatatcattaacaatttctttatgtatgttttctaaatgtggtagggtattttgatttaacattgtttctgctgaaacaaacatcccttggtcagataatgtactagcattatctagcatttgttcatataattttaactttgcttttaaaggaggttgttttttcattgcgccaaagcccacctctgcaaattcttggatggtaccccaattatgagaaatgtgcatgacatcaatatattcagcaatttctagatatcgatcttgaggtaacgttaaattagaattcatttgcacatatatgcctctttgatgcgcatattttaataatggtttaacaacattatttatagatttctttgaaaacataggttctccacctgtaatcgacatagtacgtaaattgggaatttcatctaaacgttgataaataagattcataggtaatggatcaggatcttttgtttgtaatgtataaccaactgcacagtgactacatctcatattacataaatttgttgtggtaaattctacattactcaaagtgagttgatcgaattgtttaatatcattataagcttcccacggatcattataaattgagattgcttgtttaatttttgatgttgtcattataaaaactcctaaacttttaaaacattcttctttataaaattacaataaatattattagaattatatctctttttgtcaaattttgttaggatagttatgaataaaagctaaaaatattatatataaggagttaaattccgatggatgaaaaacaaactattgaacaaattaaaacaagattgtctaaatttttagaagatattgaccacgttaatcctgatgaagtaagtgtaaaagatattgatgaatggattggattattagatcaattagaagaaaaagttaagttagtttctaagtaattgtggagtatgaaaaagtttttaactaaatttaatatttatgtttaaaccatcttaaatttgtctatatattaaatataataaaacgaaagaaaaggtgattttggttatgactaaaaaagtagcaattattttagctgatgaatttgaagatatagaattaacaagtcctaaagaagcattagaagaagcaggatttgaaactgaagttattggagatactgcgaacgctgaagttgttgggaaacatggcgaaaaagttacagtaaatgtaagtattgctgatgctaaaccagaaaattatgatgcattattaattcctggtggtttctctccagataatttacgtggagatgcagaaggacgttatggaacatttgcaaaatactttactaaaaatgatgttccaacatttgctatttgtcacggacctcaagttctaattgatactgatgatttaaatggtcgcactttaactgcagtattaaatgttcgtaaagatttatcaaatgcaggtgccaatattgttgatgaatcagtagtagttgataataatattgtaacaagtcgtgtacctgatgatttagatgatttcaatagagaaatcgttaaaaaattaaatgattaatttaaaataactttttgaaagttatatttgagcctgagacatatgtaattgtctcaggcatttttaatgtgttgatagtcgatgattgaattacaatgtaactgtattttggatagactccaatgaaactgagaatgtatcattacaagtcgtgtcaattcataagcatctgattgatttgtttttcttgttttctagaaatggagaaaatatgttttaaatgttacttttaagcatgtatatattgatgaacttaatatcgttttttaaatcctcttatccaaatttaaataatttctctctatcttctttaaagtaacttggaaatttcagcgatataaaatcaatgatacaccttgagactgatttttgattgtatatatagataaaaataacacttactgttaaactctcaattatagagtgacctttaagtaaaggagcaaacccatgaaaagaagacaaagagataactatccaaaagagaaaacaacttatgatcaaaatgagcctcattataatacctattatcaacctgtgggttcaccaccgaaaaagaagaaaagtaaacggctctttctaagaatgcttattatatttattattatatttgctttgtttactggattaatgtattttttatcatctagagcgaatgtcgatgatttacaaacgattgaaaataagagtaattttgtatcatcagacaatatgccgaattatgttaagggcgcatttatatctatggaagatgaacgtttttctaaacatcatggattcgatataaaagggacaacacgtgcattattttcaacgattggtgaacatgatgtacaaggtgggagcaccattactcaacaaactgtaaaaaattattattacaataatgaacgttcatttacacgtaaactaaaagaattatttgtcgcgcataaagttgaacagcaatatagtaaaaatcagatattaagtttttatttgaataatatttactatggtaataatcaatatgatattgaaagtgcagcaaattactattttggtgcaactacaaatcaaaataatagtagttatccgattattactgtattacaaagtgcaatgctagcaagtaaagttaatgccccaagtgtatatgatattaataacgtatcaaataatttcaagaatcgaattaaagtgaatttagaaaaaatgcgacaacagaattatatttctgacagtcaatatcaagaagccttatcgcaacttaataattattaatatagtaatataacaatttaattgaatataaactaagagtgagaatgagaataaataaacttccatttcgctcttttttaatatcaaatactatatatgttagattttctgttataaaataaatatattattaaaatacaatttttaattagtatgaggagaataatgatgccgaaaattactaaaatagaagttcaaaaaaataataaagaacgatttaatctctttcttgacgaagcatttgaaatgggaattgatatagatacactcgttaaattcaatttgaaaaagaaccaaatgatagatgctgcagaaatggaaaaaattcaaaaatacgaacactatcgtctagggattaatatggcaatacaatatttatcatataaaaaacgaactgaaaaagaagttagtgattatttgaaaaagaatgatattaatgaaatgacagtacaaaaagtgattgaatattgttataaagagcaatatattaatcatgaagattacgctgaaagtttaaaaaatacaatgatcaacacaacagataaaggacctgaagtatttaaacaaaaactataccaagttggagtagaacctaatattatagatagatatgttaaacgatatgaagaagagcaacctatagaatctatcattcatgttgctaaaaaaataatgaaaactaaaaaaggtcctgttgtgaaagtaaagcaaaaagtaatgcatagcttaatccaaaaaggatatacaatagaaactgcacaaaatgtacttaatgagttagactttgctcaagacgaagaagtgctagatgacttattacaaaaggatttagaaaaagtttataataaacaacatcgtaaacatgacggtaatacattaaaaatgaaaacaatagaagcacttatgagaaaaggatataattatgataaaataaaaattaaattagcagaaagtggtattttagatgagtgacaaaagattaagtgaaatgtctgaacaggaattgagacatgaaatacaattatgtaaagaaaaaatgcgtaaagctgaaatgaatggcataatgaatgaatatgatgtttatgaaagtaaagtcattgtagctgagagttatttagtcgatcgttctaaaattaacattggcagaatgtataaattaaatgatggtagtgaacaatactttaaagttgaacgtttaaaaggggtttttgcttggggttatagaataaatagtacgaatcctgaagagggtttacccattgcattattaaaaatttagaaggatgtaacacaaatgggaagttcaatcgttttaaaattattaaatgttacacaatactatagaaaccaaaagaatagaaagtggtatctgccgtttggatatggcgcggaagacatagaattaaataaaatatctttacacatttatcaaggagaagcccttgcactcataggagaacctggttcatccaaaacattgattggaagaattatggcccaagatattgcacctgatagagggaaagttgtacaatcagcaagtatttattatggagatataaaaaacaaacatttattaaatatgtctgttaaaagttatattgaagaaacacaatgcttatttaattacaagacgtcttcacatattgtcgatcaaattattaaatatgcgcatttagatgataaatcttcgattcaagtgaataaacttagtcactctgagtatgcgcaattgattttaagtgttgcaagagtttgtaaaacagaaattattattttaagtcatattctcgaatatcttgatgaagcttttttaaataaggcaaaacaactttcaaaagactatgtgtctaatgacttgtcaattatatttgtagacgatgatatttctaaaatatctcaagtgagtaactatgttacatggatttctcacggacaagtgcgtatggaagggtatttaaatgacgttttaccggtatttaatgatcatgaaagagatagattaagtatcgacgatgaagaaacacttaagaattttgatttagattggaagaaaagtagaagtagattgccggaaatgagttataactttaaaagagtcgaacgatacaaacatgttaaagttccggattttatagttaaattttggacgcttttagtttcaacgttaatcgtcttagtgttacttggcacactagtagtgaataatataggaaaaattgaaattcctatcaacgaatctcagaagaaagttcaaaatcaagacacggatccttttgaaaataaactttcttatggaattgttttacatgatgaagtgacattatcaaatcatcaagatattgaaatcccaaaatattcttttgtgacgattactggagaaagtgcttcaaaatatcgcttaattgtcgatgatgatacatatgaagtaggtaagaacaaaatttattattttaatcctgctgcattatatgaaacgcataaatttagtactttagcgccttatatgaagtcaaactacagtaagtatgttgattattttaatactcaattacataaaccacataaccaagtgaaaaagacacttgttcctgaaaaagatcaacgatttgtggtgcctattacacaacaacctattaaaatgttatttaatgatgaggataagttaactggttttgtatttcctatagtagataaatcaaaattagagcgtaaatttaatattaaaggtaatgtatggatttcaaaattaaataatggatatttaattgcagatatgaaaaatagtaaatggatttatatcgaattgtaggtgtaaacatgatagataagttaatattatattttaaacattttccatctcttttacatttagctaaagcaaaagtaaaagagacttggaaatatgatgtgattttatttttaatacaattaattatcattagtatcataattggagtgatgtatttttttaatacagaagaaattgaaaaggcccaatggatatatcgaatgattgcgttctatacttttgtaactattgcttatattatatataaatcattcaaattatataattatgattatcttattgctaaatcatttcaactcacacctattattacgcccatccttaatgcactgataggggctataatcatctgtgttttatcattgattacgtcaatctttaagccagtaaaccttgaaacatcggtgatatcttttgtttatttcatactaatgtcgattatatttattgtttttatatcaataacattaggtttattgactttaataagtaaaaaagtatttaaattttatgtgatagcaataatgatgttattctttttagtacctatcatttttatacctaataataaggcaaatatgattgatcaaatattaaaaattaatccattatattatttgattgacggattatcaacttcaattgtttttggatttgtaaatatgtacaatattgtgtatcatatttattttattgcttttttagtattaattggagttatcaattttattttaactcgacttgttgctcataagaaatatgaatatatttaatatatgggtgaatcgctataaataacatatattttaatgatgttataataataacccctaaatgactgtcaataagtcatctaggggttgtttaaattatagttaaagttaatgaattaatgagagtacaattttttttgaagtttttcttctgtaaatacccatccaatataggaatggtcaattttttgatcttgagtaagatgtgcaattgctgcaaaagaataatgtcctttatttagataacgtaaatctatcaatcgtatctcagttgtttgatcatcaagtttacgtatttgccaacgatagatagaagagaattttagaaacgttcttatttcaggattactttttatttgccataaaagtgtatcgggtgaaaattgttgacgttttactttatcgctaaacgttatattacgaccataagctctacctacataatcatagttttcagtttgaatcgctacacgccatttcataaatttcatagtaggtgcaacaaaaattttcacaggatgatgttcatcatgaatgtgtttcaacgcttgagatttgattattgattgcattttaaatctaacgatataataaataattaaaacgccaataattggaaagaacactagatatggatgaacgcctaataaccatagcgtgattcctatacataatattaaaaaaataattggatcgaatgtattgattacaccgagttgtatccacttatttgatataggtctaagtgcttgtgtaccatatgaattaaagatatctacaaaaacatgtaaaaagaccgctaactgagcccacatccatatatgagtcacatctacatgtggaaagataacatatattataaaagcaagtaatattggccataaaatcgtaaagggtatggaatgcgtaataccacgatgatgtgaaatataagttgcattattttttaattttaaaaccgtatcgccatcaggtattaaagaacccgcaattaaagttgttgcagtagctgtcatagaatgtgacattgctgggtcttgtgtagctaaagcagttagtccaatgccgatagcaatatgagtggctgtatccataaaagttcactcttttcatcttgatttaatatatattataatctaaaaattagaataacaaaattaagatacttatcaaatattagaaagtattataacttatacatttttttatgtaagagaaaggataatttaatgttaaatgaaacgacatttaaaaataatattgtgacatggtttgagaaaaatcaacgagaaatgccttggagggaaacgactaatccatattatatatggctaagtgaagttatgcttcaacaaacacaagttaaaacggtcattgattattacaataaatttattcatcgatttcctacaattgaagcgttaagtgaagcaaaagaagatgaagtattaaagtattgggaaggtcttggatattatagccgtgcccgcaattttcatacagcaattaaagaagtacaccataattataatgcggaagtaccatcatcccctaaagtttttggtgaattaaaaggagtaggaccatatactcaagcagctgtaatgagtattgcttttaatcgccctttagctactgtagatggaaatgtctttagagtatggactcgacttaataatgaccatcgtgatatcaaattacaatctactagaaaatcatttgaaaaagagcttgaaccttttgtacaagaagaagcgggtacatttaatcaatcaatgatggaattaggtgcaacaatatgtacacctaagaatccgttatgcctattttgtccagtacaggaaaattgtgaagcgtttcgaaaaggaactacgttagatttacctatcaaaactaaaaaacaagctaagaaaataattaatcaggaggtttttttagtcagaaatcagaaaggtcaatatctgattgaaaaacgtcaagaaaagctacttaatggtatgtggcaatttccaatgtttgaaagtccgaatgggattcaaaaactagaaaataagttaaaccattcattaactttatctgagaacataatatttcaattaaagcatcagtttacacataaaacttggaatttaaatgtttatagtatgattgaagatataaatattgactcagcacaattaccagactttatggaatggtttgatttagaaaatcgagatgattattctttcccagtatcaatgagtaaaatttatgagtttattgttggtaaatagaaaaatataatatctctctatatctctttaaagaagtttaaaaaaatatggtataattcgaattgtaaaaactttaaaaggtggtgtggagtatggtcaaagaatccatacctaaagaaggcgaaaatataaaaatccaaagctataaacatgatggaaatattcatagagtatggtctgaaacaacgattttaaaaggaacagatcacgtcatcattggtgggaatgatcataccttagtaactgaaagtgatggacgtacatggattactagagagcctgcaatcgtgtactttcattctgagtattggtttaatgtaatttgcatgtttagagaagatggtatttactattactgtaatttatcttcgccttttgtatgtgatgaagaagctttaaaatatattgattatgatttagatattaaagtttatccaaatggtaaatatcatttattagatgaggatgaatatgaacaacatatgaaacaaatgaattatcctcatgaaatagacgtaatactaagaagaaatgtagacattttacaacaatggatagaacagaaaaaaggtccttttgctcctgactttataaaagtatggaaacaaagatataaaaaattcgtaattactaagcataattgaggcaaatagtaattaattagtttatagtacttgagtaataaataagaggttgaaactacttgcctattcttaaataaatgagtttatgaatagagggttcaacctctattaatttttgataataaaattaaggaggagtcagtgtgattcgacgatatttagaatttgtcaaaccatataaatatcgtattttcgcaacgattattattgggattataaaatttggtattccaatgttaatcccattattaattaaatatgcgattgatggtgtaatcaataatggtacattaaccaccaatgaaaaattccatcatcttgctatagcgataggtattactctatttatatttttaattgtgcgcccgccaattgaataccttcgacaatatttagcacaatggacgagtaataaaattttatatgatattcgtaagcaattgtatgaccatttacaagccttaagtgcccgattttatgcaaataatcaagtgggacaagttatatcgagagtaattaatgacgtagaacaaacgaaagactttattttaactgggttaatgaatatttggttagactgtgtaacgattattattgcgctttctattatgttcttcttagatattaaattaacacttgcagcaattattatttttcctttttatgtctttacagtatattttttctttggacgtttaagaaaattaacacgtaaacgttcacaagcattagcggaagtacaaggatttttacatgaacgtgttcaaggtatgtctgtaataaaaagctttgcaattgaagataatgaagcgaaaaactttgataaaaaaaataaaaactttttaagtagagcgtttcaacatacttcatggaatgcctattcatttgcagctattaatacagtcacagatttaggtcctatcattgttattggagtagggtcatatttagcaattactggttcaattacagtaggtaccttagcagcttttgtaggatatttagaacaattattcggaccattaagacgtttagtttcttcattcacaactttaacgcaaagtttcgcctctatggatcgtatttttcaattaatagatgaagactatgacattaaaaataaaaaaggtgcacaacctattgaaataaaagaaggacatattgaattaaaaaatgtaagctttaaatataatgaagatgaatctttagttttaaaaaatataaatttaaatataaataaaggtgaaacagtagcattcgttggtatgagcgggggaggtaaatctacgcttattaatcttattccacgtttctatgatgtaagtgaaggtgaaattttgatcgatagtcgtaatattaaagattatttaacaggaagcttgagaaatcaaattggacttgttcaacaagacaatattttattttctgatacagtaagagagaatattttattaggacgtcctgatgctactgaagaagaaataatcgaagcagctaaaatggcaaatgcgcacgactttatcatgaatttaccgaatggctatgatactgaagttggagaacgtggcgtaaaattatctggtggtcaaaagcaacgtttatctattgcgcgtattttcttaaataatccacctatattaattttagatgaagcgacaagcgcacttgatttagaaagtgaagcaattattcaagatgcattagatgttttaagtaaagatagaactacacttattgtagctcatagattatcaacaatcacacatgcagataaaattattgttatgcagcatggtcaaatcgttgaaactggtacacataaagaactgattgctaaaaaaggtgaatacgaacatctatatagcattcaagatttataactaaataatgactactaaaaaagacaaacttaactttgatagttaagtttgtcttttttagtattgatatttaatttttataaatcaaaatcttcatcttgaatttcaatatctgtgtcattacgatgatacgtaaagaaacttaatcttagtctatctaaatgctctaaatgatatcgatattcttcaatagctgcgataatttgcatgatattcgaatatgaatattctacttgatatggattttgaattaattgatattgaaaagcatccataagatttttcttttgaggatttaaaatctgattatcaaaatcatctacattataacgcgccttttttgataaactttttaaaatttgttcgtgatacgctgttaacgaatctaactctaatttaatttgaaataataaatgatgatttgtattatgcaaatcattttgatatctagccatacggtttaatacttcgtaagcttgtcgagttgttccaacgacctctttaaataatatctttttacgattttgttggaaagcagcttttcttgtaaacgtacgttcttcgtgataataatcatagatttgttctaattttataatgcgagattctaactgttcaccatcttcttttatctgatgatattcagaagtatcattaatcacaagtttaaaccatataaatatgtcggaagaaatattaaccgcattatgataaattttagtttcgaattttggaggtaagaatactaggtttacaagtgaagcacttaaaactccaatcattactaaaataaatctaaatgtagctacaagataaaacgatcctgtatgttgccccataatgattaacgcagtgacacctgctaatgttgctacatgcgccaagtttaatttgtataaaatggcgattaataaaatgactgtgatacccataatcacaatgtttttaccaaaaatggttaccataatcactgctaatatagcaccgattaaattacctgtagcttgttcagatatcgttttcattgaacgatatatattaggttgcattgcaaaaatagcacttattcctgctacagatttcaaaccaacattatcaggtaaaaaagaagcgataaaaagggcgagaatgatagcaattccagttttaagtatacgtgcgcctaatttcaaatacaacgctcctttaaataacaagtttatagtttaatgtatttttaaattagtatacactcaacaaataaaactatacaagtatacgcatatataaaaacccaagaatgtatatttacgatatgacattcttaggttagttaaattttaaatattatttcatttgactgaaggcatagtcagccgcttctaatgtttgatcaatatcttcttcagtgtgttccgtagttaagaaccatgcttcaaatttagaaggtgctaaattaataccttggttaagcataagtttaaagaattttgcaaatgcttcactatcagaattttctacttgttcgtaatgtgttactttttcatctgtaaaatagagtgttagagatccataaatacgattaattgtcgcagtaatatgatgtttttcaataagtttatttaaaccatcttctaaacgtttacctaaagcatctaatttttcatatacaccatcttgctctaaaacttcaagtaatgcaatacctgccctcattgaaagtgggttacctgccattgttcctgcttggtatgctgggcctaatggagcgacatgttccatgatatcttgacggcccccgtagccaccgattggtaatccaccaccaacaattttaccaaatgctgttaaatctggataaacatttaataaatcttgtgcagcgccataatggaagcggaaagcagtgatgacttcatcgtaaatcactaaagctccatgctcatgagtgatgttgttaacttcttctaaaaagcctggttgaggttttaccataccaaaattacctacaataggttctactaatacagccgctacttcatctccccaatgtgacatggcttctttataagattcaatgtcattgaaaggtacagtaatgacttctctagcgacactttcaggtacaccagctgaatccggagaacctaattgagaaggtccgcttcctgcagcaactaatactaaatcagaatggccatgataagaacccgcaaatttaatgattttatttcttttagtataagctctagcaactcgaattgtagtcattactgcttctgttccagaattaacaaaacgaattttttctaatgaaggaatagctgctcgtaattttttactaaaatcaatttcaagttcagtaggtgtaccatataaaacccctttagccgcttgatcttggatagcctcagtaatatgaggatgagcatggccagtaattatgggaccatatgcttgtaaataatcaatgtacttatttccatcgacatcgtaaagataagcgccatgaccttcacgcataactacgggagcacctccgccaacagctttataagagcgtgaaggagaattaactccacctaaaatatattcatttgataacttttggagacgttcactttcagtgaaattcatagagtaccaacctttcttatttaataatattcgttactatcgtaacataataattataatatgaagaaatgagtgatacgatgttaaaaataggagatctttttccaaaatttgaattagagaatcaaaatggagaattaattactaatgaaaacattatgggagaaaaaacaatattatatttctacccacgagataacacaccaacgtgtacaacagaagcatgtgactttagagataatatacaatactttaatgatatgaaagttaaagtttatggtattagcggggattctagaaaaaaacacgaaaactttattaagaagcatcatttgaattttgatttattagttgatgatgaatttaagttatcgaatgcagtaggaatatatcgtttgaagaaaagttttggaaaagaaaatatgggaatagtgagaacaacgtttgtaatagatgaagcgggatatattacaaatatcattgaaaaagtaaaagttaaaacacaaatagatgaattaaaacaaatgctggagtgagataaatgaaaatcgtaagcttgaaacgtttaggtaatatagaaaatgaattaatagaaaagtatcctgatatttcattttcgttttatgataaagcagataatattccagataatgacaaaaaagaactcgaggtattgataggatatgacggggagattaatgaaagatttataaagtcttgtccgaatttaaagtggattgcatggtatgcaacaggcgtaaacaatctaccattagagtacattaagaataaaggaataattttaaccaatactagaggaatacaatcaaagcaactttcagaatatatactaacttttatattaaatgatcataaaaaaatggaaacatcatttattaatcaacaaaagcatatttatgatagtactttgacaggtaaacgtttaaaggatgaaacaattttatttttaggtactggagctattgctcaagatactgtaaagttattgacacctttcgaattgaaaataataggtgcaagtaaaacaggaaaacaaaaagaaggatttaatcaaacatatgagataaatgaattagacaagttattaggagaagcggatataataattaatacgttaccagaaaccaaagaaacatatcatttattaaacaaacatcatttccaattaatgaaggaagatactttatttattaatgtaggtagaggaactatagtagaagaacacgatttaattgaaatacttaaagaaaaattaatacgtcatgcttacttggatgtattcgaaaatgaaccactagaatcagaacatccactttatgatttagataacgtgacaattactgcacatataactggtaatgataaagaaaataaaaaggaagcaacgaaaatatttgaaagaaatctaactcgttttctcaataaagaagaaataagtgagaacgtagtagacttaaaagatggctattaatataaaacttatggaataattgacaatgaagtatgaaagtagttatattattaataagataataataattataaagtagaaagatggtgaaaatgatgagtgcagaaatagaatcaattgaacatgagcttgaacaagctataatagcattaagaaagtcaggcgttcgtatcacgcctcaaagacaagctattgttagatttttaattagctcacatacacatcctacagcggatgaaatttatcaagcactttcacctgattttcctaatataagtgttgcgacaatttacaataatttaagagtatttaagaagataggtattgtaaaagaattgacttatggagatgcatcaagtaggttcgactttaatactcataatcattatcatgttatttgtgaacgatgcggtaaaatagtagatttccactatcctcaattggatgaaattgaacaattagctcaacacgttacaaactttgacgtaacacatcatcgaatggaaatttatggattgtgtgaagaatgtaaaaacaaagaataaagttaggcaatgactttaatgtcattgctttttttgtttataagtaattaaagaatttaaaagataaatattaaataaaaaaatactcattaaagataatgaatacatttgatgtgaaatattaaacgattttatattataaaatccattgacgttcaataataatcttgctattatataaaagtcgtcaaaaacaaaagatattgtttgaaaacgcaaagtaaattagtttaaaacaatgttaaaaaagtgtaattttgaccattgattataaaaacaatttattataagatattatttgttgaaatattaattaacttcaagaaaagaaaaataaaaaaagttcttgacaagaataattagtatttgatataataaataaatgtaattgttaaaatgaacattgaaaactgaatgacaatatgtcaacgttaattccaataaagtaacttaattgttacaaacactatttagtattatgagctaatcaaacatcataaatttttatggagagtttgatcctggctcaggatgaacgctggcggcgtgcctaatacatgcaagtcgagcgaacagataaggagcttgctcctttgacgttagcggataggtagggggcaagcgttatgcggaattagtgggagtagagcgcgcgtggggggttttttaagtcagatgggaaagcccacggcacaaccgtggagggtgagtggaaactggaaaacttgagtgcagaagaggaaagtggaataccatgtgtagcggtgaaatgcgcagagatatggaggaacaccagtggcgaaggcgacttgctggtctgtaactgacgctgatgtgcgaaagcgtggggatcaaacaggattagataccctggtagtccacgccgtaaacgatgagtgctaagtgttagggggtttccgccccttagtgatgcagctaacgcattaagcactccgcctggggagtacgaccgtaaggttgaaactcaaaggaattgacggggacccgcacaagcggtggagcatgtggtttaattcgaagcaacgcgaagaacctgaccaaatcttgacatcctttgacccttctagagatagaagcttccccttcgggggacaaagtgacaggtggtgcatggttgtcnnnnnnnnnnnnnnnnnnnnnnnnnnnnnnnnnnnnnnnnnnnnnnnnnnnnnnnnnnnnnnnnnnnnnnnnnnnnnnnnnnnnnnnnnnnnnnnnnnnnaggagcttgctcctttgacgttagcggcggacgggtgagtaacacgtgggtaacctacctataagactgggataacttcgggaaaccggagctaataccggataatatttcgaaccgcatggttcgatagtgaaagatggctttgctatcacttatagatggacctgcgccgtattagctagttggtaaggtaacggcttaccaaggcaacgatacgtagccgacctgagagggtgatcggccacactggaactgagacacggtccagactcctacgggaggcagcagtagggaatcttccgcaatgggcgaaagcctgacggagcaacgccgcgtgagtgatgaaggtcttcggatcgtaaaactctgttattagggaagaacaaacgtgtaagtaactgtgcacgtcttgacggtacctaatcagaaagccacggctaactacgtgccagcagccgcggtaatacgtaggtggcaagcgttatccggaattattgggcgtaaagcgcgcgtaggcggttttttaagtctgatgtgaaagcccacggctcaaccgtggagggtcattggaaactggaaaacttgagtgcagaagaggaaagtggaattccatgtgtagcggtgaaatgcgcagagatatggaggaacaccagtggcgaaggcgactttctggtctgtaactgacgctgatgtgcgaaagcgtggggatcaaacaggattagataccctggtagtccacgccgtaaacgatgagtgctaagtgttagggggtttccgccccttagtgctgcagctaacgcattaagcactccgcctggggagtacgaccgcaaggttgaaactcaaaggaattgacggggacccgcacaagcggtggagcatgtggtttaattcgaagcaacgcgaagaaccttaccaaatcttgacatcctttgacccttctagagatagaagtttccccttcgggggacaaagtgacaggtggtgcatggttgtcgtcagctcgtgtcgtgagatgttgggttaagtcccgcaacgagcgcaacccttaagcttagttgccatcattaagttgggcactctaagttgactgccggtgacaaaccggaggaaggtggggatgacgtcaaatcatcatgccccttatgatttgggctacacacgtgctacaatggacaatacaaagggcagcgaaaccgcgaggtcaagcaaatcccataaagttgttctcagttcggattgtagtctgcaactcgactacatgaagctggaatcgctagtaatcgtagatcagcatgctacggtgaatacgttcccgggtcttgtacacaccgcccgtcacaccacgagagtttgtaacacccgaagccggtggagtaaccatttggagctagccgtcgaaggtgggacaaatgattggggtgaagtcgtaacaaggtagccgtatcggaaggtgcggctggatcacctcctttctaaggatatattcggaacatctcgtagagatgatacggaataacgtgacatattgtattcagttttgaatgtttgtgttaggcaaatccggcactcttaagattgagctgtgatggggagaggtaattgtttcctcgagtctttgatttcacactgccgagaaaagcctctagatagagattaggtgcccgtaccgcaaaccgacacaggtagtcaagatgagaatactaaggtgagcgagcgaactctcgttaaggaactcggcaaaatgaccccgtaacttcgggagaaggggtgctctttagggtgcaagcccagaagagccgcagtgaataggcccaagcgactgtttatcaaaaacacaggtctctgctaaaccgtaaggtgatgtataggggctgacgcctgcccggtgctggacggttaagaggagtggttagcttctgcgaagctacgaatcgaagacccagtaaacggcggccgtaactataacgggcctaaggtagcgaaattccttgtcgggtaagttccgacccgcaggaaaggcgtaacgatttgggcaatgtctcaacgagagaatcggtgacatcatagtacctgcgtgaagaggatagtgttgacttagttaacaacagtcaggactagtgggtatactggtacgttatttttttttttttttaatgatacggcgcacaccgagatctacacaaggggtatcgtcggcagcgtcagatgtgtataagagacagaccgtaaaccgacacaggtagtcaagatgagaattctaaggtgagcgagcgaactctcgttaaggaactcggcaaaatgaccccgtaacttcgggagaaggggtgctctttagggtgcaagcccagaagagccgcagtgaataggcccaagcgactgtttatcaaaaacacaggtctctgctaaaccgtaaggtgatgtataggggctgacgcctgcccggtgctggaaggttaagaggagtggttagcttctgcgaagctacgaatcgaagccccagtaaacgtcggccgaaactataatggtcctaaggtagcgaaattccttgtcgggtaagtaccgacccgcacgaaaggagtaacgatttgggcactagctgagcgagagactcggtgcactcatagtaactgtgctgtatctagtacacatcggacgctgccgnnnnnnnnnnnnnnnnnnnnnnnnnnnnnnnnnnnnnnnnnnnnnnnnnnnnnnnnnnnnnnnnnnnnnnnnnnnnnnnnnnnnnnnnnnnnnnnnnnnnttgtacattgaaaactagataagtaagtaaatagattttaccaagcaaaaccgagtgaatagagttttaaataagcttgaattcataaaaataatcgctagtgttcgaaagaacactcacagattaataactatattagattaagttattaagggcgcacggtggatgccttggcactagaagccgatgaaggacgttactaacgacgatatgctttgggtagctgtaagtaagcgttgatccagagatttccgaatggggaaacccagcacaagttatgttgtgttatcgacaagtgaattcatagcttgtcagaaggcagacccggagaactgaaacatcttagtacccggaggaagagaaagaaaattcgattccctgagtagcggcgagcgaaacgggaagagcccaaaccaataagcttgcttattggggttgtaggacactctatacggagttacaaaggaatatattaaacgaatcatctggaaagttgaatcaaagaaggtaataatcctgtagttgaaaatatattctctcttgagtggatcctgagtacgacggagcacgtgaaattccgtcggaatctgggaggaccatctcctaaggctaaatactctctagtgaccgatagtgaaccagtaccgtgagggaaaggtgaaaagtaccccggaaggggagtgaaagagaacttgaaaccgtgtgcttacaagtagtcagagcccgttaatgggtgatggcgtgccttttgtagaatgaaccggcgagttacgatctgatgcaaggttaagcagaaaatgtggagccgtagcgaaagcgagtctgaatagggcgtgtagtatttggtcgtagacccgaaaccaggtgatctacccatggtcaggttgaagttcaggtaacactgaatggaggaccgaaccgacttacgttgaaaagtgagcggatgaactgtgggtagcggagaaattccaatcgaacttggagatagctggttctctccgaaatagctttagggctagcctcaagtgatgattattggaggtagagcactgtttggacgaggggcccctctcgggttaccgaattcagacaaactccgaatgccaattaatttaacttgggagtcagaacatgggtgataaggtccgtgttcgaaagggaaacagcccagaccaccagctaaggtcccaaaatatatgttaagtggaaaaggatgtggcgttgcccagacaactaggatgttggcttagaagcagccatcatttaaagagtgcgtaatagctcactagtcgagtgacactgcgccgaaaatgtaccggggctaaacatattaccgaagctgtggattgtcctttggacaatggtaggagagcgttctaagggcgttgaagcatgatcgcaaggacatgtggagcgcttagaagtgagaatgccggtgtgagtagcgaaagacgggtgagaatcccgtccaccgattgactaaggtttccagaggaaggctcgtccgctctgggttagtcgggtcctaagctgaggccgacaggcgtaggcgatggataacaggttgatattcctgtaccacctataatcgttttaatcgatggggggacgcagtaggataggcgaagcgtacgattggattgtacgtctaagcagtgagattgagtgttaggcaaatccggcactcttaagattgagctgtgatggggagaggaaattgtttcctcgagtcgttgatttcacactgccgagaaaagcctctagatagagattaggtgcccgtaccgcaaaccgacacaggtagtcaagatgagaattctaaggtgagcgagcgaactctcgttaaggaactcggcaaaatgaccccgtaacttcgggagaaggggtgctctttagggtgcaagcccagaagagccgcagtgaataggcccaagcgactgtttatcaaaaacacaggtctctgctaaaccgtaaggtgatgtataggggctgacgcctgcccggtgctggaaggttaagaggagtggttagcttctgcgaagctacgaatcgaagccccagtaaacggcggccgtaactataacggtcctaaggtagcgaaattccttgtcgggtaagttccgacccgcacgaaaggcgtaacgatttgggcactgtctcaacgagagactcggtgaaatcatagtacctgtgaagatgcaggttacccgcgacaggacggaaagaccccgtggagctttactgtagcctgatattgaaattcggcacagcttgtacaggataggtaggagcctttgaaacgtgagcgctagcttacgtggaggcgttggtgggatactaccctagctgtgttggctttctaacccgcaccacttatcgtggtgggagacagtgtcaggcgggcagtttgactggggcggtcgcctcctaaaaggtaacggaggcgctcaaaggttccctcagaatggttggaaatcattcatagagtgtaaaggcataagggagcttgactgcgagacctacaagtcgagcagggtcgaaagacggacttagtgatccggtggttccgcatggaagggccatcgctcaacggataaaagctaccccggggataacaggcttatctcccccaagagttcacatcgacggggaggtttggcacctcgatgtcggctcatcgcatcctggggctgtagtcggtcccaagggttgggctgttcgcccattaaagcggtacgcgagctgggttcagaacgtcgtgagacagttcggtccctatccgtcgtgggcgtaggaaatttgagaggagctgtccttagtacgagaggaccgggatggacatacctctggtgtaccagttgtcgtgccaacggcatagctgggtagctatgtatggacgggataagtgctgaaagcatctaagcatgaagcccccctcaagatgagatttcccaacttcggttataagatccctcagagatgatgaggttaataggttcgaggtggaagcgtggtgacacgtggagctgacgaatactaatcgatcgaagacttaatcaattttttcaagttttgcgacgcaaatctttacttactatctagttttgaatgtataatcattcacttnnnnnnnnnnnnnnnnnnnnnnnnnnnnnnnnnnnnnnnnnnnnnnnnnnnnnnnnnnnnnnnnnnnnnnnnnnnnnnnnnnnnnnnnnnnnnnnnnnnngaggtggaagcgtggtgacacgtggagctgacgaatactaatcgatcgaagacttaatcaattttttcaagttttgcgacgcaaatctttacttactatctagttttgaatgtataatcattcacttatctggtgacaatggcaaggagggtacacctgttcccatgccgaacacagaagttaagctccttagcgccgatggtagttggactgacgttccgctagagtaggacgttgccaggcatacatattggagaattagctcagctgggagagcatctgccttacaagcagagggtcggcggttcgatcccgtcattctccaccattcaatttaatagccggcctagctcaattggtagagcaactgacttgtaatcagtaggttgggggttcaagtcctctggccggcaccatctaagagccattagctcagttggtagagcatctgacttttaatcagagggtcagaggttcgaatcctctatggctcacatgtatacgcgggtgtggcggaattggcagacgcactagacttaggatctagcgccttacggcgtgggggttcgactcccttcacccgcatatgcggaagtagttcagtggtagaacaccaccttgccaaggtgggggtcgcgggttcgaatcccgtcttccgctccattattttgccggggtggcggaactggcagacgcacaggacttaaaatcctgcggtgagagatcaccgtaccggttcgattccggtcctcggcattattattattttgcgcccgtagctcaattggatagagcgtttgactacggatcaaaaggttatgggttcgactcctatcgggcgcgttctcttacgggaagtagctcagcttggtagagcacttggtttgggaccaaggggtcgcaggttcgaatcctgtcttcccgataggaaattttaaaatttattatgggggcttagctcagctgggagagcgcctgctttgcacgcaggaggtcagcggttcgatcccgctagtctccaccatttaaatcatttacaaactatataacggcggtgtagctcagctggctagagcgtacggttcatacccgtgaggtcgggggttcgatcccctccaccgccactaattattagttgtagaattaaaatttggacctttagctcagttggttagagctaacggctcataaccgttcggtcgcaggttcgagtcctgcaaggtccatataattttggaggaatacccaagtccggctgaagggatcggtcttgaaaaccgacaggagcttaacggctcgcgggggttcgaatccctcttcctccgtatttggtctcgtagtgtagcggttaacacgcctgcctgtcacgcaggagatcgcgggttcgattcccgtcgagaccgccatctaataatttaatagcaatttacctataaaatgtggaggaatacccaagtccggctgaagggatcggtcttgaaaaccgacagggccttaacgggccgcgggggttcgaatccctcttcctccgccatttttattatcgcgggatggagcagttcggtagctcgtcgggctcataacccgaaggtcggtggttcaaatccgcctcccgcaatttgttttggtctcgtagtgtagcggttaacacgcctgcctgtcacgcaggagatcgcgggttcgattcccgtcgagaccgccatttaatcattttaatatatatggttcagtagctcagttggtagagcaatggattgaagctccatgtgtcggcagttcgattctgtcctgaaccatttcttgccggcctagctcaattggtagagcaactgacttgtaatcagtaggttgggggttcaagtcctctggccggcaccatcttaatggaggggtagcgaagtggctaaacgcggcggactgtaaatccgctccttcgggttcggcagttcgaatctgcccccctccaccattataaatagggacatagttcaacggtagaatagaggtctccaaaacctttgatgtgggttcgattcctactgtccctgccatggcggttgtggcgaagtggttaacgcatcggattgtggttccgacactcgtgggttcgattcccatcaaccgccctttattattaatgggctatagccaagcggtaaggcaacggactttgactccgtcacgcgctggttcgaatccagctagcccagttttttattggcggcatagccaagtggtaaggcagaggtctgcaaaacctttatcaccggttcaaatccggttgccgcctccatgtgctatgcgggagtagttcaattttagaacacattccttcccggaatgagatataggtgtaagtcctatcttccgctccataatttaatataatgcgggagtagttcaatttttagaatatgttccttcccggaacaagatataggtgtaagtcctatcttccgctccataatttgatacaatgcgggagtagttcaatttttagaatatgttccttcccggaacaagatataggtgcaagtcctatcttccgctccataattgcttccatagggaagttttttatttatctatattaagccggcgtggcggaattggcagacgcgcgggactcaaaatcccgttcctttattggagtgtcggttcgaccccgaccgccggtatttaatggagttaaaaggattaagtagaacactctacttaatccttttttatttgatcattttttaactacttattttatattgtataaaacggtataatataatattatatagctaatatttaaaaatggaggctattatgagtagaactagaataaacttaaaatatttttttagtaatattcttaatgcagttggtgcaggagtagttattgcattacttcccaatgcacttttaggagaactactaaaattatttaaagatcaccatccaatattagagcttgtttttcaattagtgacaattattcaatcgtttatggcatttattattggaatactggcagcacatcaattcaaatttagtggtgcgggtgctagtatgataggtgtatcagcaatgttaggctctggagctatacaaatgaatgcaaatggtattgcattaaaaggaattggcgatattataaacgtgattttagttattattatcgcatgtgctttatttttattattacaaggaaaatttggttctttagaaatgattattttacctgtatttattccagtagtcagcggattagttggattaacgactttgccatatatacaaattattacaaaaagtttaggacatatgattaattcatttactgaatttaatcctctaattatgtctatcttgataagtgtgacgttttcactattaatggttacgccaatttctctagttgctattgctacagctattagtttaaatgggttaggtagtggtgcagcaaacatgggaattgttgctgcatgcgttacttttttctttggttctttacgtgttaattcagttggtgtcaatttagttttatttattggcgctgcgaagatgatgattcctgtttatttaaaacatttaatcattgcaataccattaaccattaatggtattatttcaggtttgttaacatacttcattggtataaaaggaacaccattatcagctggatttggttatacaggattagttggaccaattaatgcgtttaatagaatgccgggtgattcgacatttaatattattctattagcattaggttattttattgttccattcattagtgcttttattattcatgaattatgcaaaaagtttataccatcttataatgataatatttatagatttgaaatcacacatcaataatattattttaatggtatttaagcatctatattactatagatgctttttttgtttaaaatttttattgcatattaattctttattatgtataataattaaaaagttataggaggttgctatatgaaatatatgtttaaaacaattatcatagcaatcttaattagtttgacctttataaataaagaacctatggctcatgctgatcaagatgcaaaatgggaaaaaattaaggaaagtggagaattaagggtaggattatcagctgattatgcaccatttgaatttgaaaagactgtaaaaggtaagagtgaatacgtaggtatagatattgatttagctaaaaaaattgctaaagataatcacttaaaattaaaaattgtgaatatgcaatttgatagtttactcggtgcattaaaaacgggaaaaattgatgttattatttctggtatgacttcaacaccagaaagaaagaaagaagttgatttctcggattcttatactaaaacgggcaatgtaatgcttattagaaaaagcgataaaaataaatttcatacattaaaagacttttctaataaaaaagttgcggcacaaaaagggactgaacaagaaaaaattgctcaacaagaaatagagaatgcagacattagttcattaaatcgtctaccagatgctattcttgcagttaaaagtaataaggtagaagggttagtaatagaaaaacccgttgctgaagcatatgtaaaacaaaataacagcttaatgatagccaatgtgaattttaatgaagaaaagaaagataatgtcatagctgtgccaaaaaattcacctattcttttagcaaatgtcaataaatctattaaggaagtcaatgaccaacatttaattagcaaatacatggacaaagcttctaaagatatgcaagacgatagtagcttttttgataagtatggtgcatttttcatcaaaggacttaaaaatacaattttaatatcaatgattggtgtagtattaggagcagtattaggagctttaattgctttagctaaattgagtaagtttaaattgctgtcatggattgcctctatttacatagaatttttaagaggaacaccgatgttagttcaagtatttttagttttctttggaacgacagctgttctaggtttagatgtttcagcattagtatgtggtactatcgcactagttattaattcttctgcttatattgcagaaatatttagagctggaattaatgctgttgataaagggcaaacagaggcagctcaatgtttaggattaaattattctaaaacaatgagatatatcattttaccccaagcaattaaaaatattttaccagcactaggtaatgaatttgtaacactaattaaagaatcatctattgtttctactattggagtaggagaaattatgtttaacgctcaggttgtacaaggtatttcatttgatccttttacaccgttaattatcgctgcgataatgtactttattttaacatttacattgtctagaggtatgagtttaatcgaagggagaatgaaagccagtgattaaagttcaaaatttaaataagtcatttaataaaaatgtagtactcaaagatattaatttagaggttaataaaggggaagttgtagcaataatagggccatcaggaagtggtaaaagtacattattaagatgtatgaatttattagaaataccatcaaatgggaaagtgatttttgaaggaaaagaattaacacataaaaatataaatttaaatgaattacgtcaaaaaatgggaatggtatttcaaaatttcaatttatttcctcacaaaacagtaatagaaaatgtcattttagcacctaagttgttaaaaaaagttgatttaaaaaagctagaaattgaaggtaaagcacttctaaaaaaagtagggcttgaagagaaagctaatgcatatccttctcaactctctggtggacaaaaacaaagggtagcaatagcaagagctttagctatgcatccagatgtcatattatttgatgagccaacatcagcacttgatcctgaagttgtttatgaagtacttaaagttatgaaagatttagctaaagagggtatgacaatggtggttgtaactcatgaaatgggttttgctaaagatgttggtgataaagtaatatttatggcagatggatatgtcgttgaaagtgaaacacctgatcaattatttaatcatcccaaacatgaaagaactaaaaactttttggcgaaagtattatagcatgttgtatgtgaagactaataaaatatttataaggttttatatctaaaaagtaataaatgttaattaagaaaagaagatagaatgtattctgaattataaacatagactttctttatgaaattctcaaagttaaagaatctgagacacttcaaagtatatctcagattcttttttatttataaaaatatttaatatcataaaaaattaagattatgttaaaatattctatggacttttttataggaggcaagagtgttgatgaaccatcaacttaaacaggaaatcattgactatgcgtattccattggtatagatagtattggttttactaccgctgatcctttcgatgaactgaaacaaaagttagtagattatcatgaaaaaggttatgcatcaggttttgaagaatcagatattgcgctgcgaacagaacctaaattatctttacccacagcacgttctatcatagctattgctgttggttatccaaataagctaaagggagcgccaaaaagtgtaaaaggcgatagaagaggaatgtttgcgagagcctcttggggtcaagattatcattcaattatgaaaaaaagattagataaattaagtgaatttattcaatccaaggtccctgatgtcgaaataaaaagcatggttgacactggggtactttcagatcgcgctgtagctgaaagagcaggattaggattcgttggtagaaatggatttgttattaatccaaaactaggaacttggacatatttaggagaaatgttagttagtattccttttgaaccagatgatcctatattagacagttgtggagattgtacaatttgtgtagatagatgtccaacgggtgctttagtagggaatggtcaactgaattctcaaaaatgtatcagctttttaactcaaactaaaggatatttaaaagatgagtatcgatataaaatcggtaatcgtctttatggttgtgatacttgtcaacaagtttgtccgaaaaatagaggtattaatacaacccacgaagatattattttagaacctgaaatattaaagccacgtttagttccattgttacaaatgagtaataaagaatttaaaaatacttatggtcatttggcaggagcatggagaggtaaaaaacctatacagcggaatgcaattattgcacttgcacattttggtgaagaagcggctattcctgaattaaaggaagtagcattgaatgatccaagacccatgataagaggaacagcatattgggctattggtcaaatacttggcaatgatgcaagaacatttatttatgagcactatgataatgagattgaagaagttcaagttgaaatgagaaaaggactagaaatgaggaaataaaatgacaaatcatattgtgttattccaaccagaaatacctgcaaacactggaaatatcgcacgtacatgcgcaggtactaatacacacttgcatttaattaaaccattaggctttagtacagatgacaagatgctaaaacgagctggattagattattgggaacatgttaatatcacttatcatgaaaatattgaatcatttttcgaagtgacaaatggtaaatattatttacttactaaatttggtaaacaaacttatagtgattttgatttttcaaatactgaaatagaaaattattttatttttggtagagaaacgacaggtttaccagattgggtgaaagagaagtatgcagatactgctttaagaattcctatgagtgatcatattcgctctttaaatttatctaatactgctgctttattgatttatgaagcattgcgacaacaaaatttcccaggattaaagtagaatttaaaattaattactataatagaataaaaaatgttatatttattaatgaattattataaaaattttaaaatagtttgatatccccttaaatagggtaatttagtaaataaatgaattattttagttgaactttacatttagaggagtgtaattattatggcaatgaattttaaagtatttgaagataaacaacatgcagcagattacgctggagatattattagaaaacaatttaacaataacccaactaccattgctggatttcatttaaacaaggattctgcacctgtattagatgaactaaaaaaatcagttgatcgtaacgctgtagattttagtcaaattaatattcttgattatgatgataatcattcgttctatgaagctttaggtgtaccttctgagcaagtatattctattagtcttgatgatgatgccgaatcattaatcaatgatagaattaaaacaaaggaaaataaagggaaactgactttacaagttgtttcaatcgataacactggacatttagatgttaatattcgtcaaggtttgatgaaagcacgtgaaattatcttagttgtaactggtgctaaaaaaagtgaagttatcaaacgattatatgaagaaaatggtaaatcaaactttttaccagctgatttaaaagtacatcgtatggtaacagttgttttagacagagctgctgctgatggattaccagaagatgttaaagaatacttcacagcgagatttgcataatatttaattttattgtgaggttatttttatgagtaaagatagtaaacgtaattatcatgaagacgaaaatgcaatggttcaaaatatgaatgatttagaagcattaggaaaagaaatggaacagatttctgaagaaaatgatgaagataaatataatcaaacacatgattcagaagcgcgttcagatttaaattaatatattttagcattttaattaattgcttcggtagattaattaaaatgctttttttatgtaatacaacttatgatacaatatattttaatgaaaatgaaggagataaaaatatgttacataagtattggctacctttaacaattattacaatcattgttagcttaatttctattaaaggttttcccattgctctaggagcactctatctaccagtgttatttaaagtgattcaattacaattgaatttatcaaaagatttaatcgataatgcaactgctcatccattcattaagagtaatcaaaaaggaattatgattagtgtgatatgtatattaattgtaaccggaatcttggcatatacacttaatgatttttatcgaagtttaggtgggggtttaggtatattagtaaagataagtcctgttacgctggtcataagcgctattttgtatataataagtgctatttcagttgtaaaagcagtaaaatataaatatgaataagatttaattcttaaacacgtgaagtaatacaacttcatgtgttttattttataaatgaaaccgctttatattcgaattgctacattaattttattaatgatatactattactaaatcataaataagggggattattgaatgtctgtaagaattgaacatgatacgtttggtgaaattgaagtaccatctgataaatattggggcgcacaaactgaaagaagtaagcgtaactttccactaggtaaagaacatatgcctattgaagtgatttatggttttgctcagttaaaaagaggtgctgcgcttgctaatcatgaattaggaaaattaagtgatactaagaaagatgctatcatttatgcttgtgacttaattttaaaaggagaacttgatggtcattttcctttagttgtatggcaaactggaagcggtactcaaagtaatatgaatgtaaacgaagtcgtaagttatgtggctaatgagtacttaaaagaacataatagcgaggaatcaattcatcccaatgatgatgttaataaatctcaaagttcgaatgatactttcccaacagcgatgcatgttgctttataccatgaaattgaaacgaaattagaacctgctttaaaaaatttacgagacacgtttaaagaaaaagaaaaccaatatcaatcaattattaaaattggtagaactcacttacaagatgctactccaattcgattaggacaagaaattagtggatggcgttatatgctagataaatgtgaacaattattggctgaatctaaacaacatattttaaatttagctattggtggaacagcagttggaacaggaattaatgcacatccagaatttggagataaagtagctaaatatatctcagaacatactggttatgcatttgtttcatctgaaaataaatttcatgctttaacttcacatgatgaagtggtgcaacttcatggaacactaaaagcattggcagcagacttaatgaaaatagcaaatgatataagatggcttgcttcaggacctagagccggacttgcagaaatttcgattccagaaaatgaaccaggttcatcaattatgccaggcaaagttaatccaacacaatgtgaaatgctaacaatggttgcagtacaagtgataggaaatgatacgacagtaggtatagcgagttctcaaggtaattttgaacttaatgtatttaaacctgtgattcttcataatacattgcaatctatttacttattagctgatggaatggaaacatttaatgaaaattgtgctataggtattgaaccaattgaagaaaatatcaatcattatttaaatcaatcattaatgcttgtaactgcactaaatcctcatattggatatgaaaaagcggctcaaatagctaaaaaagctcataaggaaggtttaacacttaaagaatcagcaattaattctggctatgttacagaagaacaattcgagaaatggattaaaccagaagatatggtcgatcctcattaaaataacattaccaattgaaatgctccttttaaagataatgctttgatctgcgttatctaaaaggagcatttttaaaatttattcatcatctaaacttacagaaatcaattcttgagtaagtggatgagtgaattctatcttataactattcaattctaattgacgtaaggtagcatctccatataatggatcacctatgacaggatgaccaatttctgctaaatgtacacgtatttgatgagtacgtcctgtatctaattttatttccaattgacaaatgccttctttaatcatttttgatgttaagatatgagtgatagctcgttgcccggtattagaaatacgacgcttattgggatgaaatttatctttaccgattggcatatcaattgtttgtggttttagaggtagtaatgcttttacatttgcacgataaatacgtgtaatttgattctcttcaagcattctatctagtatttttttcattaaaggatttttagcaacaattaataatcccacagtttcttggtctagacgatgaatcggttcaacgtagtcgctatccatggtatagataacatggttcattagtgtattgctttcttttaaatcatttggatgagttttaactcctttaggttttaccacgatcgctaaatcgttatcttcatatgcaatctgtgcgtaacgataacttggtaaataattacttttttctttaggggtaggaatataaacaacatcatttgtgacaactttatctgtcaatttactagattgttgattaatcgtgatatctttagacatatttaattggtgtaaatctttttttggtagttttaacttttgaaaaatttcacgtaacgtataattattgaaagtttcaggtacattgaatttcataatatcctcctattatattctgtttaatcatatcataatttacaatgataattataaatgttttcattagtctatttttaaatttaaaaaatgaacgatataataataaatgcaaaataacaaaatggggcgaaaatatggagaaaccgacacgtttagcattattaaaagaaattgctgaatatctaaatgaagaaactgaattatataatatgatgaataaagcattggattatttaatcaatggcagcaattttacaacaggttggattttttttatcaataaaaaaggtgaacaagaacttgtagctagcactgacttacctcattcattaaaaaataataattgtaagtatttaaacaatggtacgtgttggtgtgtcaatgcttatcatcataaaaatttaacaaaagcatctaatattataaattgttcaagaatcaatttagctaaccaagaaagtcaaaaagatgattatcttattacgcatcatgcgacagtaccacttagatcaggagatgaacagtatggattattaaatgtcgcgacacctcatactgtagtatatagtcaagatgatttagagttattagaatcagtagctttacaaattggttctgcaattaaacgtatatacttaacagaccaagaaaaagaagcagcacgcacaagtgaacgaaatcgactagcacgtgatttacatgattcagttaaccaaatgcttttttcattaaaactaacagctcatgctgcacatgatatcacagaggatagaacagctaaaaaagcatttaagttgattgaagatacaagtcaaaacgcagtaaatgaaatgcgtgcgttaatttggcaacttaagccaattggtttagaacatggattagtgaatgcgattgaacattatgcgaatatgttagatttaaaattaaacatcgaagtaagaggattgattaaattatccaatttagttgaagaaaatgtgtatcgaatgattcaagaagctctaaataatacgaagaaacatgcacaaacgaatcatgtatctattaacattcaacaaaatgaaaatcaattatatattaaaatttatgatgatggaaaaggatttaatgtgcgtgatgacttaaatcaaacgacgcatggtctaaaaaatataaaacaacgtattcatagtttagatggagaatttaacatacaatcagataaactaatggggacaactatttatcttaatattccaatttaaagtaggtgataaatttggcaagtatcgttttaatcgatgatcatcacatcgttagacaaggactagaatttctaatttcaacagttgagggtttagatatacaagcaagtttttcagatggtgaagcatttattaaatatttaaatgagaataatattcctgatttagtattattagatttagttatgcctaatatgaatggtatcgaagtgacgcattatataaaaacatattacccttacataaaagtgttagtgcttacaagttatgtggatgatgaatatgttatgtctgccattaatgaaggtgctgatggttatgaaattaaagatgttgaaccacaaaagctgattgctactattactaaagtattaaataatgagaaaataatacatccaaaagctaaaaatgtaattgatgcaatgcatgaaaaaccacactttaataataaattatctaaaagagagatggaagtattaaaagaaatggtgaaaggtaagacaaataaagacattgcaaaaagtttatttgtatctgagaaaacagttaagacacatgtcagtcatatatttaataaattgcaagtttcagatcggacacaagctgctatatatgctattgaaaataaattaatataaattgaataggtctattagaaataaaacggtatttttaaaataggataataataaataaatgacttatattattattttaattattttgataattttgccatttataaaattatacgtaaaaacaaaaatttctcttttcattttattgaaaatatattaagatgtaatttgtgtttcaagaaatgtgtattattgcaatttcttgcgtccggataaaataactcctattagaaaggtagagaagagtaatggatagacagagttttacagatttaattcaaacaaaatttaaaatggtgcgtattgaagcaggatacacacaagatactatggcacaaacaataggtctttctaaaaaaacacttgttcaaatcgaaaaagaacgggtattaccaaactggacaacttgtgtatcaatttgtgctttatttagagattcagatgttttaaataacacatttggttgtgatccattagaaattgtacaaacaatttcaagaaaccattgtgcatatcctaatcattctacaacaagtgatatttattggaatacaatggaaactcgcaatggatttattttacaaagtaataaagtaagtaatatctatagagtgcttaatcctgaaaaacaacctatttttggaacatctaaattaagagaagcagaaacttactttaatagaaatgctaaagaagaattaatgcacgtttaattttaatataaataagatatagtgatagaagagttgactttcaactgaatcactattttcaattaataatgaattcactgtaattttgcgatgaattcattatttttttatttcaaaaatttgtaaatataaatgtacgttgaacaattaagttatgaagtttacatttgtcatggtataattttgctattgcttatataaaaattaaggagttatttaaatgcaagcagtattagtagtcatctttatgatagtaataggagcaatcattggcggtgtcacgaatgttatagctattagaatgttgtttcacccctataaagcgcattatatatttaatatgcgaatcccatttacacctggtttaatacctaaaagaagagatgaaatagctacaaagataggacaagtgattgaagaacatctcattacagaaacattgattcacaacaaactaaatgaaacaaaaactaaagaaacgattaataaattagttaaggagcaaataacgaaattaaaaagtgatcaagctacaattcgttactttgctgagaaatttgatattaaaattgattacttagtcaatgagaaattagaagatacaatttcacacaagctattagctttttataatgatcatcgaaatgaagaagtgattaagttactaccaaaagaaactaagcgaatgattgataagaaagtcgagccattaggagatttattatgcgaaagagcacgtgtttatttgtcctctgataaaggcgctcgtgatatttatgacatgcttgatacattttttaatgaaaaaggtaaaatcgttggattactacaaatgtttatgacaaaagaaagtattgcagatagaatccaacatgaattgattcgtttaaccaatcatcctaaagcaaaacgtattgtaaaccaagtgattgataatgaatatgagacgctgaaacgacaaccacttaagaaaatcattgatgaggctcaattttcaaaactatcagactcagttaccttacttattacttcatatttaaatttaaatgaaaaaatagataaaccacttaatcaactatcaccaagattaatgcaatatttagagacaacgttatcagataaagttacacaacttattattagtcaagcatccaaacatctctcaactataatgcaaaaaattaatctacgtaaattagtagaagatcaaatcaatacatttgatttagattacattgaaaagttgattattgaaattgctaataaagaattaaaattaattaccttattaggatttatattaggtggtattattggccttttccaaggtttaatcgcaatttttgtataactaatcataatatgttatggtattaaagagttgtcaaaacatcattattacacgaaggagtgcaatttaaaatggcagtaaatttatatgatcatgcaaatcaactagaacaagcattaagagatagtgatgaatacaaagctattaaagatgcttttgctaaagttaaagaaaatgaagaatctaaaaaattattcgatgagttccgtgaaactcaaatgaatttccaacaaaaacaaatgcaaggtcaagaaattcctgaagaagaattagctaaagctcaagaacaagctcaagctattgaaaaagatgaaaatatttcacaattaatgcaagcagaacaaaaaatgagtcaagttttccaagaaattaatcaaattattgtaaaacctttagacgaaatttacgttgactaattaataatttaagtgatggatactacgcgattttttcataaaattgcgtagtttttttatgtcaaagttcatcgacccatattcataagatatggtaaaatatagtaatacataaagataccttatcaaacatttaaggagcttaaattaatggttaaatttattcactgtgcagatttgcatcttgatagcccttttaaatctaaacaacaattatcgacaagtattttcgaagatgtacaaaaaagtgcctatgagagctttaaaaaaattgtagatgtagcattaaaagaagatgttgattttatgttaattgtaggagatttatttgatagtgaaaatcgcacattacgtgctgaaatttttttaaaagagcaatttaaacgtctggaaaaagaacaaatatttgtatacatatgtcatgggaatcatgatcctttaacaactagaattacagataattggcctaataatgtatcagtattttcaaaccgtgttgaaacctatcaagcgattactaaagctggagaacaaatttatattcatggttttagttatcaaaacaatacaagttatgaaaataaaattgatgaatatccatctagtcaaagaagtaatggtatacatataggaatgcttcatgggacttatagtaaatctaaaataaaacagcgttatactgaatttatgttagaagatcttaatcataaactgtatcattattgggcactcggtcatattcatcaacgtcaagaactaagtgatatgccgcctattcattattcaggtaacattcaaggtcgccactttggtgaaataggaactaaaggttgtttgcttgtagaaggggatcatctacatcttgaaacaacttttataccaactcagtttatacgttttgaagaagctacaattaagactgataaaatttcaaaacaaggtatctatgaggaaattcaaaagtttaagaaacaagttcgtgaacaaggtaaagcattttatagattgacgattaatatagataatgacaaaattttatcaacacaagatattcttcaaataagagaaatgattagtgaatatgaagaaaatgaacatgattttattgtcattgaagatattattcttaattatatacagaatgaagaaacacctcttataaatgaattttctaaagaactcataaacgatgacaaagtgtttgaagaggcaatgacagatttatatttaaatccaagagcttcaaaatatttagaagactacaccactttcaataaggcaaaactcattcatcgagctgagaaaatattaaaagcagatatgagaggtgaagaaattgattattaaatcacttgaaatatacggttatggtcaattcgtacaacgtaagattgaattaaatcagaattttactgaaatttatggggaaaacgaagcaggtaaatcaaccatacaatcatttattcattcaattttatttggttttcccacaaagaaagaaaaagaaccgcgtttagaacctagattgggaaatcagtatgggggcaagctaacgcttattttagacgacaaatctgaaattaaagttgagcgtgtaaaaggtagtgctcaaggtgatgtaaaagtttatttagaaaatggattgataagagatgaagcatggcttaagaagaaattaaactatatttcaaaaaagacatatcaaggaatattttcatttaatgtacttggtttacaagatattcatcgaaatttagatgaacaacaattacaaagctatttattagaagctggtgctttaggatcttccgaatttacatctatggggcaaattgttaatcagaaaaagactacgctttataaaaaagctggaaagaacccaattctaaaccaacaaattgaagaactaaaacaattagaagcacaaataagagatgaagaaaccaaattagacgaatatcaacgtcttatagatgaaaaagataaatcagaacgccatctttctcatttaaaagaaaatcttaagcaattatcaaaaatgcatgaaaataagcaaaagcagttaggacttcatgctcatgcgcaagaatggaaatcacttgagcatcatttaaatatcgaaccgttgaagttcccagaacaaggtattgaacgatatgaaactgcattaaaatataaacaatcacttgatcgagatataggattaagggatgagaagataagacaactagaaaatgaatttaatttaattcagatgcctgaggatagaactgtaagtgatatgtatcatctttatcaacaagagagtgatatcaaacaatctgaattaaaagctaaggctttaaaaaaggaaatagaaacttttgaacgttctcagcaaacattaaaagatgatatcggttggaatgaagtttatcatgaagcggatacttctgaaacgatgaaggattatataagtgaaaaaattaaaaattataatcatcaattaaatcaaaagcaacaagttgaacgtatgattggtgagcataatattgaaaaaaaggaaattgaaaaggaaattaagtcattggaaagtgaactcgtttctgaaacagcacttgaaaagaaaaaagaatataatcagcaaaaaatagaattacatgaaaaagaaagtttatactcaaaattaaaagcctcctttgaatcagaaaaagaaagaaaacaaaagcaatatcaatggttaaaaatcagctttatcattttggctttgataagtgctggtttgactatttttgcatttattacaactagtgtcacttttagtatcatttttgcaattctcactgtgatatttttagtaggtttattctttagtaaaaataaagatattgattatagtgaaacaattagtgaggaaattagtgatttagaacaacaacttaaagcactcgaagataaatacgatttagatttcaatctagatgatcagtaccaattgcgtgaacgttggaataatgctaataatactaaaacagtactttctaataaacttaaccatcaacattcgattttatcagatattcaatcttcaattgatgcattagcacaggatatttctgaagtcaaacaagacattaaagtatcagatagaatgtcagatgaacgtttagtagatagtttgaaaacaatgaatcaacttaaagttaatgataaacaacttaataaattattattagagaacatagagttaaaccaaaatttaattaacttctatgatcatgctcaggatgttactaaagatagtttcgacgagtttaataaaatttcattatttaatgatttgaaacattggatttctcagtatgaaagtaaaaaagaaaagaaaacgcaattacgaaatcaattaactttattaagtaaagaattaaaacagttagaaagtcgtttggatgaaaataaaacaactataaacgagttgtttaaatatattgaagttcaaaatgaagaacaatattatcaacattacgaagcttatcaacgttatcaacaacaactatcacgattcaatgatttatctacctatttgagtaatcacgaattctcttatgaagatagttctgttttaagcgaaaaaacaactgctcaattagaagaagaagatcaaatgttagctcaacaagttgatgattataatgataaatatttggagaaacaaactgaagtgagtgaactttcttcacgtattcatcaaatggaaacagataaaacactatctcaattgcgccatcaatattataatttaaaaaatagaatgaatgatattgctaaagattgggcgagccttagttatcttgagacactaatcaatgagcacattaaacaaattaaagataaacgactaccatatgtgatagatgaagccattaatattttcaaaacattaactgatggtaagtataatctaattacttatgaaaatgattcaattaaagttaaacatcgaaatggacaaatgtatcatccacttgaattaagtcaatcaacgaaagagttgctatatatttcattaagacttagtttaattaaggtgttgaaaccatattatcctttcccaattatcattgatgatgcattcgtacattttgataaacaaagaaaatcaatgatgttaaactatttaagagaattatctcaagaacatcaagtattgtactttacttgtacaaaagatactacgattccttctcgagaaatgctgatattaaataaaaaagaggaaggcggtaaacgatgagaaacgtagaaaaattaaatcctggtgattcggttgagaattttttcttaatccacagagcaacacaaggtgtaacagcacaaggtaaagactatatgacattatatcttcaagataaaagtggagatattgaagctaaactatggactgtcacaaaagatgatatgaaaatccttaaaccagaaataattgtatgggtaaaaggggatgttattaactatcgtggccgtaaacaaatgaaagtcaaccaatttcgattagcaacagcagaagatggagtgaaaacacaagactttgtagatggtgcgccactttcacctaacgaaattcaagatgagttatcacattttatcttagaaattgaaaatgcacatttacaacgtattacgcgtcatttattaaaaaaatatcaagataaattctttacttatcctgcagcaagttctcatcatcataactttgcaggaggattaagttatcatgtattaacaatgttaaaaattgcaaaatcattgtgtgatatctatccattattaaatagaagtttgttatatagcgcgattattttacacgatattggtaaagtaaaagaattaagtggaccagttgccacaacgtatacggtagaaggtaatttgcttggacatatttcaatagcaagtgatgaagttgctgaggcggcaaaagaacttggcattgatagtgaagaagtcatgttattgcgacatatgattttagcacaccatggaaaaatggagtttggttctcctaaattgccacatctaaaagaagcagaaattttattctttattgacaatattgatgcaaaaatgaatatgtttgataaagcatttaagaaaacagaaaagggacaatttactgaaagaatcttcggtatggataaccgtcaattttataatccagagaagttagattaatattaatagacgaaaaaaggtcggaacaatttgttccgacctttttgatttatgaaaattatgaagataatcctgatgaagcaccactactttgttgttcttttaatttttctggattaagtatagtatcttctacagattttttaatatcactatctttataatctacgttgtattcttttaataagtctttataagcattagtcaatagttttgggtttttttgaactttttgttcaataatttttgtttttaattgagatttttgtttgttgaagtcatcttctttattagctttgataatgtgatagccgtattctgttttaacaatgtcagaaatttgaccttcttttagtttaaataaagctttatcaaatttatcgaccatttgtcctttaataacataacctaatgatccgccttttttagctgaagcagaatccattgattcttttttggcaagttcatcaaatttatttggatttttttcaacttccttttgaattttttcagcttttgcttttgcttttttatctgataaaccttctttatcactatcagatttaactttaattaaaatgtgtgatgctttcttagtgtcatcttttatttctttgtcagaaactttgattttatcattaagtaattgtttttggtaagcagatagtcttttctgttctttgtaatcatcaagtgtcataccttgttgttttagcatactttcaaattgatctttaccaccatattgtttttcttcttttttaatatcatcatcgatacgcttagtatctactttgtctttatatttatcagctaatattttatttaactcaatactaaatgatgtgctggcaatttgatctttaccaattttatccataacatctttaacggttacattaccagcttttgaagaaattaatgtattatctttagaatctgtagaatcagaactacatcctcctagtaataaaacacctgctgtaacagggacaatgagtttattcataattttcatagttgatagctcctttgtgtatgttaacaaagttactataacataatataattattccaccaattaataaaagatgatttacaactaaagtattagatgaaaaataatttaaaaaaagtctacaatatcattcaatatcatagactttttaatatattcaaaataaccactagactctattttaattttgattgaatacgtttataattaccatctttatatcttagatatttgaatggaaggacacttttgtcagtaaattaatacctgtttggtgttcttcaacaaattgtccttcttttgaaaaaagaataatttttaaatataaaaaatccataactgataaaccaagatttaaggcaagtaagaacataaaataatgtccataacttggaaaatgataagttaggaaaattaaaatgcttgtaattattaaaaatggcaaaataagattaatgcaaaaataaaacttgcggacaggcgtattcacatacgtattaaaataaggaagccattttttcttattcaacttgtgccatctaaatgcatgaatataaggtaaaaagaaaaataaatgtattgttttgtgaatagggtacatgagaataataaataatattagaagtaaaaagtatttatctgataaaggcgtttttacaaaataatacataatctcataactaactaaaaacgcaataatagttgttacaatactcaaaaaagcaattcttggaacaccaaatcgcgcatgaatatctatatgacgtttacataaaaacatgactacacctcgaaaataggtcgtttaatatacgataggtattatctaactaagttgagttatcgtcaagataatttttaatagctattgtaatatagaacaatgtttttatattagattgtatatttataaaaaaagccataaagaaatctattaatataaatttctttatagccaaattgagctcaatgttagagttctatttgttattattcttatcttctgaaaatgtattactaatttcttcgccacgattttgaagattttcaatatgagattttaatttttcaatattaggattgatatcagatttaaaatctccgattaaagtcttaaattcgtttgcaatgtcgctgccttgttgtacaccgtcatttttcacttgcttactataatcaataatattatagaaactacgtttaattgtttcgatttctcgttctaattctgagcgagcaccagtaggaactttttgtccagaggcattagcattatatctttgttgatcacgattcatccatgatacggcaataccagaagcaagtcccacaccgataccaaataatacacgtgtaaccttcattttttattctcctcactattatgtcgtttatagaataaatcatatcattttatgaagtaagtaacgattgacttaagttacttactataattattacatcgacatattgatttcattttatattacccgtaaatgatattcaatatgcagaattattcaaattgagctttaatttgttcagcaatatcttttttctgttcatcgctaatttcgttttcatgagtttcccattgataaccaaaaccatcaatatcatctttatatcgtggtaggaaatggaaatgtaaatgaaatactgactgatcagcatattcaccattattttgaataatatttaatccatcaggttgaaatgcttttttaatggcatttgctacttttggaatagcaactccaatgtgtttcattgtttcttcatcagtttcaaaaatattaggagaagctttcttcggaattaaaagtgtgtgtcctttagtaacttgagaaatatctaaaaatgcataaacataatcgttctcataaaccttatagcttggaatttcaccagtaagaattttaccaaaaacagtttctgacataattacatgcactcctttaacctatttttactcattattataacattgttattttaaaaattcgctaatgagttatagcaaactttagtagttatataatgattttggtacaatataactcatggaggtgccttatgacagttaaagttgaacatttaacaggaggatatggtaaacgtcctgttattgaaaatataaattttgaattaaaaaaaggtgaaatagtaggattaattggtctcaatggcgctggaaaaagtacgaccattaagcacatgcttggattattaacgccaatggaaggaacactttcaatttcagataccaatattaatgatgatattgaaatctaccgtcgtaaactatcctatattcctgaatcaccagtcatttatgaagaattaacattagaagaacatatagccatgactgctatggcttatcaaataagtaaggaagaagcaatgaaacgtgcgcgtcctctactaaaaacatttagacttgaaaatgaacttaatgtttttcctagccatttttcaaaaggaatgaaacaaaaagtaatgattatatgcgcatttattgtcaatcctgaactttatattattgacgaaccatttcttggtttggatccattaggtatacaatctatgcttgatttgatggttgaaaagaaaaatgaggggcgtacagtactaatgagtactcatattcttgcaactgctgaaagatattgtgatcgattcattattttagatagaggaaaagtggttgcttttggaaatctagaggaactacgagaacaaacgggtcttaaagatcaaactcttgatgatatctatatccatgttacgcaaggtggtcaagcgacatgaataatgaagccatagcattatttaaacaacgttatgatgcaataaagaaagaaaaacattattataataaatttatttttaatggtcattttactgtattcttagttattttattaggagcctttatattaggttatggtcaatggttacaacatattcctaaaaatatagattatgcattcttagcaagtattgtaattgctttaacttcaatctttccatttcgaacatttttaaaagatgctgacaagttatttttgcttccttttgagaagaatatggaagattatataaaattaggcctaagatatagttattttaatcgtataatattgcaaatagtgttattaattgtattgtttccattattttataagcttaatcaacaattagttgtatcttatatcgtgatgagtgtattagcgcttattcatcctattttaggattacgcttaaaatggcaatggtatcgtgcgagattgtctcaatggatattaaatatcttaatattttcacttaattttataacgtattatctagttttagggaatcaattatattttgccattttattaacaataatattctttggcatggtgtatcttatacctaaatttaagagtcttacattatttccatgggaacagttgatttcagtagaagaaagacatcatacaaattattataaatttgtaaatatgtttactgatgttaagcatttaaaagaaaatgcagcaagacgcaaatatttagattttcttttacccacacccaaaggacgccgttttaattcgcacaatatgtatctttatttatttgtgagaagttttgtaagagggaaagatgcattaagtattattcttcgacttgttatcattgcacttgtacttatgatttggctgtctcatccacttgtttctattattattggtagtttatttatgtatattattttattgcaaatgtctcagttttatacgcagcaagcgtatggactatggcctcaagtttggcctgtatcagatagtaaagtaatcaaaggatatgaaaaattcttatatcgccttatgattatgataggtattattttcgcaatcatttttatcattttttatatgaaatacttcttttttgcaattgtattctttattgtaggatggttgacgattagaagtacgattaaaaaattgcaatatcaggaaactttattaagagattaaaaaaagagggaacttaagatgtattaaacacatacttaagcgtcctctttttatgttaatcgttaataggatataaatatctttcaaaataacttgaatgttgactgcttgagccaaaataatgtcttaatgcttctttagaaaaataatcattaaacatatcagatgatttaaaatcttcgtatgtttgacgactagcgaagccaaagtaaattttataagtagtaccttcttcaggtcttaagaaacgataacttttaaaaccagcaaattgactaaaatctaaattcaaatttgaaagacgtttttctagttgattgacatgatcatctgaacttggaatgaagatagctgaatagaaatgttgattattaagttcatttatttcattaataacttcataagtagtaggatgtttaagtatagatttatcttcggattcttcgataatgactgaagaatcattagttgaataaataaacagatgattctcagaatgatttaaacgaatttgatttaaatagtcataagttccataagttgtatatattttcataagctatacctcctttatttatgtatattatacgattaaatgataagactagctattataaataattaaaataagaaaataaattgtgaataatttatttaaatcaattcacttataattacaaatttaaaattaaagaatagatagaagtgctttgtcatttttatgacatttaatatttaagaaacgcgaaatcttttatgttgtgatattatgaataagaatgattttaatttaggaggacaaaatggtgcataaaaaaaataatacaattttacaaacaattaaaggggaattaacctcacacacacctgtgtggtttatgcgccaagctggcagatcgcaaccagaatatcgcaaattaaaagaaaagtattcactttttgatattacacatcaaccagaactttgtgcatatgtaacacatctacctgttgataattacaatactgatgcagctgtgttatataaagatattatgacaccacttaaacctatcggagtagatgttgaaattcaatctggtataggacctgtaattcacaatcccattaaatctgtgaaagatgtggaaaaattaactcaaatcgaccccaaaagagacgtgccttatgtgctagaaacaattaaaattctaactgaagaaaaattaaatgtacctttaattggatttacgggtgctccctttacattagcatcttatatgattgaaggcgggccgtctaaaaactacacatttactaagacaatgatgtatggcgatgaagagacttggtttgctttaatgaatcatcttgtagacgtttcaattaaatatgtaactgctcaagttgaagcaggtgcagaattgattcaaatttttgattcatgggtaggcgcacttaatgtacaagattatcgatattatataaaaccatttatggatcggttggtctgtggaattaaagaacaacataatattcctgttatattatttggtgtaggggctagtcatcttattaatgaatggaatgatttaccaatagatgttctaggtttagactggcgtacatctattttgcaagcaaatcaattaggtgtaaataaaacattacaaggtaatttagatccttcattattactagcgccatgggatgtattagaacaaagagttaaagcaatacttgatgaaggaatgcaaagaggtaaacatatatttaacttaggtcatggcgttttcccagaagttcaaccagatacacttaaaaaagtaacacaactggttcatgattatacgcaaaaataaaattagaatcataaaaatttatttttaaaagggaaggttttaagaatgactaaaacagtaggtttattagtaatggcatatggtacgccatataaagaaagtgatattgaaccatattatacagatatacgacatggtaaaagaccaactgaagaagagcttcaagatttaaaaaatcgttatgaatttataggtggactttctccacttgcaggtaccacaaatcgtcaagctgaagcacttacagatgcacttaataaaacatatgatgatgtagaatttaaattatatttaggattgaaacatatttctccttatattgaagaagcagttgaaaaaatgcataatgatggtattacagaggcagttacagtcgtattagcgcctcattattcaagtttttcagtaggttcatataataaacgggctaaagaagaagcggataaatatggtatacaactacatcatgttgaacgttattatcaacaacctaaatttattaaatactggacaaataaagtaaatgaaacactagctaaaattccggaagaagaacatgatgaaacaattttaatcgtgtctgcgcacagtttacctaaaggattaatagaacgtaataatgatccttatcctaatgaaattaaagatacaatggatcgtttagaagcttctacaaatattaaacatgtagcgcaagggtggcagtcagaaggtaatacaggtacgccctggctaggacctgatgtacaagatttaacaagagaattatacaaagaacatcactataaaaactttatttatacacccgttggatttgtttgtgaacatcttgaagtactttacgataatgattatgagtgtaaagttgtttgcgatgacattggtgctaattactatcgaccagaaatgcctaatacaaatccgttatttataggtgcaattgtcgacgaaattaaaacagttttttaaaaaggaagggacatgttgtgagtaaaaaagttgcaattataggcgctggcattacaggtctagccagtgcatattattttaaacattataatgaagacatagatgtaactatttttgaagcaacttcaagacctggaggtaaaattcaaacttatcgccgcgatggttatactattgaacttggtccagaatcttacttaggtcgaaaaacgatcatgacagatttagcaaaagatataggtcttgaagatgatttaattacgaatcaaacaggacaatcctatatttttgctaagaaccaattgtatcctattcctggcggatcaattatgggaattccaacagatattaaacctttcttaaaaacacgtttaatttctcctttaggaaaattaagagcaggattagatttagttattccgcctattaaaatagaaaatgatatttcggttggtgaattcttcagaaaacgtttaggaaacgaaatgctggaaaatttgattgagcctcttatgggagggatttatggaacagatattgatcaattaagtttgatgagtacgttccctaatttcaagcataaagaagaatcatatggtagtttaattaaaggaatgaaatatgaaaaacgcgaacgtacaagaaaacgtcagctttatccgggcgctcctaaaggacaattcaaacaatttagacatgggctaagttcatttattgaagcactagctaaaaatgttgaacaaaaaggtgtacacatcaaatacaatacaccagtagaagatattcatattcataatgataattatgagattgttacacataatagtcgagagacgtttgatggtttacttgttacgacaccacatcaaacgtttatgaaatggtttaatcatgatccagcatttgaatactttaatactatggattctactacagttgcaacggttgtatttgcatttgatgagaaaaatattgaaaatacttataatggtactggatttgtcattgcgagaactagtcatacagatattactgcatgtacttggacgactaaaaagtggccatttacaacaccaaaaggtaaagtattattacgtgcgtatgtaggaaaacctggcgatacggttgtagacgaccatactgatgaagaaattgtaaatatcgcacgtcgagatttaagtaaaatgatgacgtttaaaggtgatccagattttacgatagtaaatcgattaccaaaaagtatgccacagtatcatattggtcatatgactcaaattcgcaatatacaaacccatgtaaaacgtcaatataacgggttacgcattaccggtgcaccgtttgaagcggtaggcttacctgattgtattcaacagggtaaaaatgctgttgaagaattaatagacgaattataaataaagcatagtaaataagcactttttagaggttatattttctctttaaagtgctttattttaaaataaatagtcattattaaggagaaaaggagaataagaaatgacagatgtgattattgttcactcacaaataggaaatgcacataatcattggtatcaatggttaaaacataacctagcgcttgaaggatataatgtacaattgtttaatttagataaagaggataacaaaaaattagatacgtggataaaggctatgaaacaacaaattaaaatcaatcatcctgatacgtatgttgtaacccatggctatggttcaatcgctgccttgaaatttattgaacaagtagatttaaaacgtccaatagaaggcttttttagtattgctggatttaaagaagatgcgcaagacattgatgaatctgttaatttagatcatattaccattgattatgatgagattaagaaaaaggttaaacactttcacggccttgcttcaaaagatgatgaacatgtatcttataaggaaactgaaaagttgttgcaagctttaggaggatcaattcgaattgttgaagaaggaggtcacttcctagaagaagaaggcttcgtttctttcagtgaactacaagaaaaaatgcaaaaatatatgacacaataatgttagagtgggaaagtatcaaatagtaatataaagagtaataaataattatgagattttataaccaaattaccccataaaataaattttttaagtttagcgtttttttacacaaattaatttatggtttttattgactatatggatattaatatatatactaataaagtattaaaaaaagcactactaaaaaataattatctcataattatttaaatttataattaaagtattgtaaaatttattttaaaaaagtgttgacattacagtgacttaaatgatatattaattaagtattcatttgaattactaaataatattagcgcgggatggagcagttcggtagctcgtcgggctcataacccgaaggtcggtggttcaaatccgcctcccgcaatacataattttataggtctcgtagtgtagcggttaacacgcctgcctgtcacgcaggagatcgcgggttcgattcccgtcgagaccgtcattacttttgacttatgattaaggttcagtagctcagttggtagagcaatggattgaagctccatgtgtcggcagttcgattctgtcctgaaccatttacactttggcggttgtggcgaagtggttaacgcatcggattgtggttccgacactcgtgggttcgattcccatcacccgccccataatcgttattaagcgggtgtagtttaatggcaaaacctcagccttccaagctgatgttgtgggttcgattcccatcacccgctccatagtttaattattccgcagtagctcagtggtagagctatcggctgttaaccgatcggtcgtaggttcgaatcctacctgcggagccatggctccttggtcaagcggttaagacaccgccctttcacggcggtaacacgggttcgagtcccgtaggagtcatataaacagaagtgaaacatcgcttctgtttttttatttaattgaatagaggagagttgtccgagactggctgaaggagcacgcctggaaagtgtgtaggcgctttatcgcgtctcaagggttcgaatcccttactctccgtatcaaaagctttatatcatagggtttagacttagcaagtgtcaattatgtgtcaagaaaataattctctgacatgttgaccttgctctttttatgttcttactctccgtacagtagctcagaatggttattttccattctgggttttttatagctacaagtatttaactatatttatctaaaaagggtaatatcttttaaaaaataaaacaatcacaaaataaatttaaacatgaatcctgttaagtcatttaaaaatcgttataatatagtatgtataactattggaggaatgaatagtggaattttggttaaaagagcaaagtataaaaaacaaaaacaaaattgcggttacagatggtaagtatacattaacatataatcaattatattctgcagcgtatcagctttcaaagaaattattatctttaaatgaaagtagggtaggactatatattggaaacgacattgagtctattattttagtgcacgcatgttggttagcgcaaattgaaattgcaatgatcaatacacgattaacaacaactgaaatgaccaatcaaatgaactcagtgaatgttcaacttattttaactacaaaagagttcgatttacattcacatcaagttctctcatttaatcaactgagcgattatcctgatgcgcctaatcataaacaatttgatattcatcgtattgcatctattatgtttacatcagggacgacaggaccccaaaaagcagtacctcaaacgtttaaaaatcactatgcaagtgcattaggttgtaaagaaagtctaggatttgatcaacaaacgacatggttatcggttcttccaatttatcatatttcaggacttagtgtgattttacgtgctaccattgaagggtttactgtacgtttattaaataaatataatactgaagatatgctgactattattaaaaatgaatatcctacacatgtgtcacttgtgccacaaacgttaaagtggctaatggatgctggtttaaataagccatactcaattgaaaaaatattacttgggggtgctaaattatcatccacgctcatacaacaggcattgagttatcaattacctatttataattcttttggaatgacagaaacatgttcgcagttcctaaccgcttcaccagatatgttagctaaacgatatgatacagtaggtaaaccaagtgataacgttgaagtatgtattaaacaacctaatgaagagggtcatggtgaattacttatcaaaggtgacaatgtaatgaatggatatttgtatcctaaagatttggataacacatttgaagatggtttctttaaaaccggagatattgcagaaatagatagtgatggttttgtaatggtttatgatcgacgtaaagaccttattattagtggtggagaaaatatctatccttatgaaattgaaacagtggctaaaacattcaatggaattatagatgcagtatgtgtacctaaagaagatgatacttggggtcagattccagtactttactatgtcgcaagtgaaacaattgaggttaaagaccttatagatttcttacaagaacatttagcaaaatataaagttcctaagatatatcaacgcgtcaatgcattaccttatacttctactggaaaattacaacgtaataaagttggaactgaggatcattaaatgaaaattattgatatacaattttattactataccgcgccgtttcattctccgattacgacgcctaaaatcgaaatgacacatcgcaaagcacttatagtacgatttatttctgatgaaggggaaaattattttggtgaatgtaatgcctttgaaacggattggtatgatactgaaacaattgagacagtaaaaatacgaatacaacaatggtcaaaaaagattttaaatcaatcattcaatacatttagtgactggttaccttatcttgatttattagatagttatccggctactagatgtactgttgtgatggcggtttatcagatgttttattcacaaccgtgctttaacgttgaatatggtgcaacagtaagtggtttatcttcttcacaattacaaacacttaaagacacaaagccagcacgtattaaattaaaatggagttctcatctcattaacgacataaaaaagctacgcaatgaacttccatttgaatttaatcttacactcgatgcaaatgaaacactggatatgtcacaatttcaattattaaaagagattgatcaacacgatattctatacgttgaagaaccatttaaagatttaaatgatttaaactatatagatgttacgcattatcctgctattgctattgatgaaaaagcaacggatttacaatcaattttgaaaattattcatcaatatcctatcactgcagttgtggttaaaccatttagactgggaggaatagatagagcgctagaactcattcacttattaaaagagaaagatattaaagtgatcgttggtgggatgtatgaatatggactcagtcgatattttactgctttattagcaaaagaggggtcttatccaggagatattactccagatggatattattttgaaacagactttacacaaggcataggcaaattaaaagaaggattgatatatttcaatccccctaaaattaatataaatgcattatctgtttatgaatgatgatgtgtatgtttgtctttttttaaaggtaccggatcaaatccaccttcatgaaatggatggcattttaaaatacgttttactcccatgtagccacctttaaatgcgccatatacttctatagcttctttagtatattcagaacaagtaggatagaatcgacatgttggtggtgtcataggggagatgaaacgctgataaaaacgaatgatgcttagaaatgattttttaagcataaataaacctcctatagacatttgattattaaataattttaccacatttaagagggggatgagtaatatggagtttatcgatcaagaggatagacgagtcacgatgcaatataaaactgatgatgatataccgaacggaaaccatgttttagctattccgatatttcaaaatcaattattattcactaaacactctaaaagaggtatcgagttccctggaggtaaagttgaaattaatgaaacgagtcaacaagcgattgctagagaactttatgaagaaacaggtggaaagatagaagccttatattatatcgcgcaatatcaagttcatacctttgataaatcactttttaaaaaagatgtgtatgtgattaaagtgaaatccattgaacataaacatgactatttggaaacagagggtcctatattatttcatctagttaatgagattcctgagcaccaaaaaagttatttaattaaagatgaagcaattttaaaatgtttagaaagggtgaaagatcttgggtattacgaatattagaacaatgcctgttgaatccaacactcatcgatttgaggaactaacttatacagtagacgaattaagggtaaaagcgttacagatggtcccaatgtatcataatgttaaacgtattgtagtttatttacgtggtggaaaagggcaagttggtagagtaagagcttcaagacttatgcaattttctgatccatatacattagttataggaccctattatagaggaagtaatggtagtgaaggaaaagatgaattttgtaatgctgatttacatgatgtaacagtacttattcgactattaaaaaataagcatccccaagctttcgtccatatgattggattttcaagaggtggaattcaaggtctattatcatttcaggatgatccagttgatagctatattatttggggtggcgtttcagatattcatttaatgtatgaagaacgtgtagatttaaggggaatgctaagacgtatggtaggtcatccgaaaaaagataaagaggcatatgaacaaagaaatgcgatacgtacattgaatcaaaacagtccacctattttaattgtacatggtggtaaagattggcaagtgggtatacatcaagcgtattttcttcaagaacaactagaacttaaaggggtcaaacatgatacattttatcaacttgacgaaggccatgtaccaagaccgaaagcattgaaagaagttttagattatatacatcaatggatgaataatatagaacaagacttataaagatgactacaacggtcatctttgtaagtcttttgtttatatattattaatgactaaatccaccatttttagcaatatcttttacttcatctccaaattttttgaagttttcttcaaaacgttgttttaagtcattagcttgatgacgataagcctcaggatcattccaagcatggattggatttaaaatcgttttaggcacatcttccatttcaattggtatacttaaaccaaatatttcatctttagtaaatgtagcttgttttagtttgccagaaatagcttgatctaccatataacgtgtataatgtaagctgatacgacgtccaacaccatattttccacccgtccatcctgtatttactagatatacatcaacatcatggtcatcaattagcttaccaagtaaattcgcatatttagtagggtgcaaaggtaaaaatggagcgccaaagcatgttgaaaatgatggttcaggttctgtcacaccacgttcagtgccagctaattttgacgtaaaaccacttaagaaatgatacatggcctgagatttagataatttagaaataggtggaagtacgccaaatgcatctgcagttaagaaaataattgtattagggtgtgcggctttagaaggtaatacgatattatcgatatgatgaattggataagcagcacgtgtgttttctgtgttcgtattatcatcaaaatcaacatggccacgttcattaacaattgtattttcaagaatagtaccatattgaatggcattataaatttgaggttctttttctttagataagtgaatggcttttgcatagcaaccaccttcaatgttaaaaataccatttttattccaaccatgttcatcatcgccaattaatttacgatttggagtcgctgataatgttgtttttcctgtaccagataatccaaagaatagagcaacatcacctttttctccaacattggcagaacaatgcatactcataatatcttacataggtaataagtagttcatcactgaaaagataccttttttcatttctccagcgtattcagtaccaccaattaaaatcactttatgtttaaatgaaacaataataaatgtttcagaatgagtaccatcaacgtctggattagctttaaaatgaggggcagaaacgatagtgaaatttggcttaatatgacttgcttcctcaatagattcaggtcggataaacatgttttgggcaaataaattatgccatgcaagctcattgatgatttttaattttaattgtgagtctttatcacttccggcataaccgttaaaaacgtataattcctctttttgatctaaataatctaatactttgttgtataaatttaaaaacacgtcttcatctataggttgattaatgtctccccaatcaatattgtctcgatatgaaggttcgttaacgataaatttatcttttggtgaacgaccagtatatttacctgtactcatattaattgcgccaagttcagtaagttgaccttcattattgtttaaaattttgtaataaagctgagtagtagaaagttgaaataaagttgtttccttttctaataagtgtttgattttaggtgtttcactgtatgtatctattgacatacaacatccctccaaatatctattcatttattaatgtaagcccttacattaaaatagtataacataatgatttaattattccattgtaaataaaagaacatttaaaattcaaaattgacaattctaatgtatttatgtagtataggtcttaacggattctcttatcctgagtggtggagggacatggacccaatgaaacccagcaacctctttttttaaaagaaaggtgccaaaccgtttgcagacgcaatatttgtctgaacgataagagcgaatggacgtttaagagccttctctctatctaggtagttgagaaggctcttttattttaagctcattgtcaaaagagaattttcgtaaatatagttaagaaaaggagcaaatcatgacttataataaacgtttatttacatcagagtcagtgacagaagggcatccagataaaatcgccgatcaagtatctgatgcgattttagatgaaattttaaaagacgatcctaatgcacgtgtcgcttgtgaaacaacagtaacaacaggtatggctttaatttctggtgaaatttcaacgtctacatatgtagatattcctaaagtagtacgcgaaacaatcaaaaatattggttatacaagagctaaatatggttacgattatcaaacaatggctgttttaacagctattgatgaacaatcacctgatattgcccaaggtgtagataaagcacttgagtatcgcaatgatatatctgaagaagaaattgaagcaacaggtgccggagaccaaggattaatgtttggttatgcaacaaatgaaacagaaacatatatgccgcttccaatctttttatcacatcaactagcgaaacgcttatcagatgtgcgtaaagacggtaccttagattatttacgtccagatggtaaagttcaagtaacagtagaatacgatgaaaatgataaacctaaacgtattgatacgattgtggtatcttctcaacatgctgaagacattgaattagaacaaattcaaaaagatattaaagcgcatgtcatttatccaactgtacctgaaggtttaattgatgatgaaactaaattctttattaatccaactggtcgatttgttattgggggtcctcaaggagacgctggtttaactggaagaaaaattatcgtagacacatatggtggttatgctcgtcatggaggcggttgtttcagtggtaaagatcctacaaaagtagaccgctctgccgcatatgcagctagatatgttgcaaaaaatattgtagcagctggattagctgagcaatgtgaagtgcaattagcttatgcaattggtgtagcagaacctgtatctattgctattgatacatttaaaactggtaaagtttctgaaggccaattagttgaagcggtaagaaaacactttgatttgagaccagcaggtatcattaaaatgcttgacttaaaacatcctatttacaaacaaacagctgcatacggacactttggtcgtactgatgtattgttaccatgggaaaaattagataaagtgaatgtcctaaaagatgccgttcaaaaataatgtaggatatacatcaatcaattaggttaaacctcgaaattatcgtctatttctattataatagatagatattgacagtttaaaaggagcgttatctaatgaattcatttggaccgattgagattggtttaattgtagcgataatcatagcgattatatgttttattctatttttagttgccttgaaaagtaaaaataatatgaaacacaaagcgagtgaagaatacaatctcaaggaacaacaactcaaatcttcacatgaggaagcacttgaaaaagaacgtattgaaaataaaaaacaagtaacgaaacaaaaagaagaatttgaagctacagttaatggaaaagaacgtgaaattgatgctttgaaattattttctaaaaataaaagtgaatacgtgactgatatgagactcattggtattagagaccgtttagttaaagaaaaacgtattagacgtgaagatatgcatataatggctaatatatttttaccaagtaatgagtttaataatattcaacgcattagtcatcttgtgcttactagaactgggttatatatcattgattcacaattattaaaaggtcatgtgtataatggaattagcggcgcacaatttcaagaattaccaatgctgaagcaagtatttgatacacttgatttaaacacacaagcgcctcaaacgttagtgcttgatcaacatgaagataatcattcgaaactatcatttattaattattctgatcaactttctgcaattgagaatttagctacagatttacaaacagaattaggacttaaatataagccaacatcaattttatattttaatcctaaacatgataaagacgtaacgatttcaaactattcacaaagctcaagtgttaaggttttagttggtcctgaacaacttgacgaattctttaacaaatttgtattccatggacgtattcaatataatgtcgatgaattacaaaatattatggataaaattgaatcatttaactaagagaggctaccatcaaaatttaaaattttgatggtactttttttattacaagcgatgttcataaatatacttttagggtatatacagaatagttatttttaaaggaggaagtaaaatggactatattgaattctataatggaaatcacatgccaatgttaggacttggaacatttcgagtagaaaacgacgatacttgtaaagaagcagttaaacatgccattgaatctgggtatcgtagcatagatactgctaaagtatatggaaatgaagaacaagtaggccaaggtatcaaagaaggattagaatcaacaggtttaaatagagaagatattttcgtaacatcaaaattatttttcgaagatttcggacgtgaaaatgtggctcaagcctacgaaactagtatccaaaaacttgggttagattatttagatttatatttagtacattggccagggacaaatgaagccgtaatgattgatacatggaaaggtatggaagatttatataaagataatagagttaaaaacattggagttagtaatttcaatccagatcattttgaagcattattagcacaagtttcaattaaaccagtcattaaccaagtagaatttcatccatactttactcaagaaaaacttagaaaatatttagaagcgcaaaatatttatatggaatcttggtcaccatttatgaatgctcaaattttaaacgatgaaacgttaaatgaaattggtaaagaagttaataaaacagcagcacaagttattattaaatggaatatgcaacataatgtcgtcgttattcccaaatcagttacatcaagcagaattgaagaaaatatagatgtatttgattttgaattatcagcagatcaaatgaaacgaattgatgatttaaataaagatcaacgtataggacctgatccagatacatttgaaggttaatcaatttaattaaaaaagagtgaacttgtaggttaatttactacacagttcacctttttgttatattataaaaccaatccaacaagcaataaatcctataacaaattgcaatagagaatacatcataaatttaaaaagtttgaaagacggtgttagacattgcgcaagctcataagacatggttgaaaatgtcgttaaacctcctaaaaatccggtaataaaaaacatatgtatccagtttaagtgaatagagagcccagtcgttaaaccaatgagaaaacttcccatccagttgacgattaaagtagcaataggtattgaagtagaccatttggatttagtgacatcagttagccatgctctaacgacagcgccaaaaccaccgccaatcataattaaaagagcttgtatcaagatgtaagacctcctaatttcatacctatccagcacaagataacaccaaagcaataactcataaacgcataaaccacagctaagataatatgatggctgtaaagtaatgtgactaactcaaattgaaatgttgaaaaggttgttaaagcgcctaaaaaaccagttgtaataccttttttaattttaggatgatctttaaataatttaatcattactacagatagataacccataagaaaagcacctgacaggttagctatcaatgtgccaattggaaagatgctactctgatttataaaggaaaacaaaaatcttaataaagcgcccaacataccacctataaacacggttaaatattgcatagtatactcacctttatataacattttatgtgtatttgattatgaaaaaatgccaaatgttgtaacagaagcaaaaatatggaacaaaattactactaatatgacataaggtaatattttagaagcagtcttaaaccaatctttatttttataatttaaatgtttaattgctttatcagaaaatataattgaagcaataaggatgataacatttacaatactacatgcaattaataaattttttattgatttaaattgaatacttaataaaggattaaatgtattaaaataaaagctaataattaaaagaatcactgatatatataaatatttttttgatttagacataacatacctccgatttatatcattaaataatattaccacatttaatttcatttttaatagtacctttatcataaggttttaattttcagaaaattcaaagcaaaacattcgcatacacaaaaaaagcatgatataaataacataacgaaatagtaaaacatactgtacataaaaaataattatacatatggtgtcttttcataaagcaagctatattcgtaatataaatgagaagggaagattttatgactcaattaaatgtagaagtatttgctgatggtgcagatatcgaacaaatgaaagctgcatacaaaaataaagaagtagatggttttacaacaaatcctagcttaatggcaaaagcaggtgtaacagattataaagcttttgcagaagaagcagtacgtgaaattcctgatgcttctatatcatttgaagtattctcagatgatttagacacaatggagaaagaagcagaaattttaaagcaatatggtgacaatgtgtttgtaaaaattccaattgtgaactcaaaaggtgaatctacaattgaattaattaaaaaattatcagctgatcatgttcgtttaaatgtaactgctgtttatacaattgaacaagttaaagctattacagaagcagtgaccgaaagtgtacctacatatatctctgtctttgcggggcgtattgctgatacgggtgtagatccacttcctttaatgaaagaatctgtaaaagtcgcacatagtaaacatggtgttaaattattatgggcaagttgccgtgaagtgttcaatgttattcaagctaatgaaattggcgccgatattatcacttgtccatcagatgttgttaagaaagttaacaataatcttggacgcgatattaatgaattgccagtagatacagttcaaggatttgcaaaagatattaaaagttctggactatctatattataaaatcactatatctaaattatgaccaaccgagtctaagactacaaacatgtcttagactcggttttagtgttatatgaatatcaaagagaaggagtaataaagtatcttgagttgtatctttattttttattgagtttgttttaaaatcggtgttcagttaaaatttatgaatataattaaatagaaaggaattaagttatggaggaaactgcttttagagaaaaagtaagaaaacaattgtggtttttaaataaaaaagaaaagcaattattagaacatacttttgaacaaaataatgcttcatttaataatgcagaacagaaatttatgaaacctactcgttttgctaatcaatttttacaggttcatatctttcgaaataaacatttttcaaatggatatttgttcttattaattatattatttgttctcgcatacatcctattactaggatggtttttagctggatttatcgcaagtttagcagtagtcaatcaatttataaatcctaaagcagaattaagtttaatctatcgtgtattaatcttagtttttgccattattagtttgattgtcagtttgtatctcataagatttgtgactgctttgtttactaaaagattacttgaatataagtttaatgaaaagaagtcgtcttattaattaaataggctaatagaatactttcttgccattttttataaactaaaatgtaaggctcatcgactatgcattgaactgaattatcaaagataataatggttttattttgagaagacgttaatccaataatacgttgagcattaaaatatatttgtatgggtgcgcgttgatgtttgattggaaataaaatgatgtctttagaaatataaataggaactagtttattgatagataataagcgtttagctaatttaagttgttgcgtatatgatttattaaattgttctagatagtatatgactatctttttaatatgaaatggtagaatcatttcatatgttttaaaacaacatttagtctgaattgttgaaccttctaaagtttgaatgtataacaaatcgaaagtattatgaggtaacatgccaatcaccttctaaataatattgctgaagtttgatacgggcagaagatttatattttttaattgtagtgtctgagacattcatctttttagcgatttcatattgtttgtatccatgaagataatatatcagccattgatattcatttgaatttaaaatatatttgaaatcattaaaaaaagattcatctttcaatgtataagttaaagaatgaggtaacgctgcaatatctaggcaatcaatcttcaattgctcctttctaaaaagatcaataagataaaactttaatcgctgatagataaaagaggacaaagatacagaggaagatgggttataaattttggagatttcccacaattttattaataatagttgataaaattcatcataattataagtgatacggtattgtcttaacaaatgatgaatcatcttatgatattttatgtgtaatgaactaaaatctgaaatatttattctttctccttagttatgtacataaacaatatttccggatgtataaattctacatgaggtatcgtgaatttttatttgcttaatttaataaataggtgttaaatagtaaacatagaatcgttggattggatgatatatagctttaacaagtttgtaagattaatattcgacatttgtacaataaaatataggaggtatgaagttggattacgcacatttaaatcttgagcacttttttgcaagacatgatgatttagacgttattagagatcgttctgaatttgtaatgataaataattttacaaatgaaatgatgtatcgtgatggtgatattgaagggacgattgatttaaatcaatattattataaaaatagatcgcaagctgtcagttttattatgatggattataaaagaaataacgaataattaaatatgttaaccttactacaaataactatatttatttaatagataaaaatcattgagtaatgaaatgttgagtatttcattacttttatttttttgttaaatttcaattttgttacttttattttatgaatatgtaacattataattataaaattgtttaagagaattaaaaatgttaaaatttattatcatggaagacttttctataaatgaaattacaacattaacctaagaggtgtgaatatgacaaagcacagaaaaggttctattataggcctaatagggttacttattattttagtagcagctggcttcatttttttctcaatgatttctgatcagatatttttcaaaaaagtaaatgaagtagagaaagttcagcatgtgaacgtcacgcttgataaagctgctgcaaaacaaatagataactatacaagtcaacaagtatcgaataaaaataataatgcatggagagatgcatcagcaagtgaaattaaagttgcaatggacagcagtaaatttatcgatgatgataaacaaagatatcaatttttagatttatctaaatatcaaggtattgataaaaatcgtatcaaacgtatgttgttcgatcgacctacactattgaaacatactgatgcttttgtaaatgctgcaaaagaaaaacgtgtcaatgaagtctatttaatttctcacgcattattagaaacaggttcagtaaaaagtgaactggcgaatggtgtaaatattgatggtaaaaaatattataatttttatggtgttggagctttagatgaagatccaatcaaaacaggtgctgaatatgcgaaaaaacatggttgggatacaccagagaaagcaattaaaggtggcgcagattttattcataaacacttcctatctcacgatgatcaaaacacattatatagcatgagatggaatcctatgaatcctggtgaacatcaatatgcgactgatattaaatgggctgaaagtaatgcggaaattattgctgatttctataaagaaatgaaaactgaaggtaaatacttcaagttgtatgtttataaagatgatcaaaaacatcaataatcaaaataaaaaccaacattatctttttaattagatgatgttggtttttttatttattctgctttgttttttcttgaagcccaagtaaatccaatgataaaaacaattaatgtttttaataaaaatttcattgtttagtcacctcaatatttaaattttaacatagttacacatgattatttatgctttgaaatggataatcgtgttaatagtgaaacgttttgaagtcgagaatcgtattggtataatatgataatattcaacataatacaaatatataaaaggatgatgttaaatatgcgagtagcaattataggtatgggtacagcaggtgtgagtgtacttagacaactcgttaaacataaagactttaagcaattaaaagtcgatgtctacgataatgaatttaatatggggcagggtgttccttttcaaaatgatagtagtcaattattaattaacttacccactaaaaatatgagtttaaatctagatgatgatgaagagttttggaaatggtatcaaacacaatctgattttacgtttaaaaatccaaagtatttaccaagatttgtttttggccattatatgaaatcatacttatcaaattatgagacattatatgataaccttacagttattaaacaaccagtacaagaagtcttcattaattcaaatatagatgaaaccacattgaaatattatgtctgtacgtctaaagatatgaagcattgtcaagtatatgattacatatttttaactataggtactttatcatatcacgacccttatcatttaaaaggcataaaaggttatattcaaactccttaccctacatataatactttagatgatgtacaagaatctgatgatattgctattattggaacaggattagctagtttagatgtagtgcgttatgtagcgtttcatcaccctaaactacctatcacaatgacgagtcgttctgctcaattacctagcgtaagaggaaacatgaaaaaaattgagtttcaatatttaacgaaatctaaatttaatgatattaaagataagtactttggaaatgtaccattagagaaagcattcgatttatttaaagaagagtgtgaattaaatggtattgatttacagaaattggttcatcgccgaacaggggacacgattaaagatttaaattatgatttagaacatcctaatgagataggtatattccaaacattaatagagaatgtcaaagaaaatttaaattggatttggaatagttttagtcgtcaagatcaaattgaattcgataaacgtttcactaaaattattcaacttaactcaaatcctatgcctccaagaactgcaaaactcatcaagcaattaataaaagatggttcattagtgattagaaaggatttagaagatgtggtacataaaaatggaatatttaatttaaaattcaaacatgatgaacaatggtatccacatcatattattattaatgcaacaggttctaaaacacatttaaaagatttagatgaagatgatcaatttatcttaaatcttcaaaatcgacaaattattcaagctcatcctatgggtggaatacaaattatcccagaaacaaatcaggtgattagtccaagatatggtactttaaataatatgattgctattggacaaatcactaatggagtaaataaattgcgtaatggagtaaaaatgattgttaatcaagcggtaagtgcagtggattacttatatgaaattcgaaaagaatttgatcataaagcataatgctttacacaataatgaataaatgtctctttaagagttaaatttaaaaatcaaattgaaattctttatttgtaattttccaaaaataaatgtaagatgatatatgtagcactaaactacaatgactcaaatttaatcacaatttcatacgtattctttcggggcagggtgtaattcccaaccggcagtgattaagcctgcgacccacttaatcttaatttattaagtggctgatctagtgagactctagagccgacagtaaaagtctggatgggaggaagaatcaatcacatcattactgaatgatgtataagcatgcacaatataaaaattgtagtacgcttatttaagtatatatacatgccctatgcctgtgaaacaggtatggggtttttttagaggtgataaattgagtgaatttatgaaatatgcaattcaattagcacaaatggtggaaggacaaactggagttaatcctcctgttggctcagttgttgtgaaggatgggcgtattgtgggactaggtgcacatttaaagcaaggagagaaacatgcggaagttcaggctttagatatggcacaagataaagcaaaaggcggcacaatttatatttctcttgaaccttgtacacattatggatcaacaccaccttgtgtgaataaaattattgaacatgggcttagtaaagtgatttatgctgtaaaagatacgacgttatcttctgagggagatatcattcttgaaaaagcaggtattgaagttgagtatcaatattcagaagaagcttttgctttgtatgaggatttcttcaaagcaaaacaacataaaattcctgaaattacagtaaaagtctcgacttcgttagatggtaaacaagcgactgatagtggacaaagtcagtggattacgaataaagcagtaaaacaagatgtatatcgtttaagacatactcatgacgcagtattaactggtaatggaacgattgaagcggataatccacaatatacaacacgtattcaagagggtaaacatccaataagaatcatactatctaagcgaggccaaattgattattcaaaacagatatttcacgatcaattaagtgaaatttggatttatactgaaaatcatgaattaaaaagtccaagtcatcatataaaaataatctatttagaaacatgtaatttaaaatctattttatctgatatatatcaaagaggtgtcggcagattattagtagaagctggacctcaaataacttcagaatttctccaatctaattatttagaccatcttattatttattatgccccgaaaataataggcggtattggaaaaaatcaattttatcaaactgataatgtcattgatttagctgatgcgccacaatttgaagtgatttctaccgagtctattcaacaaaatattaaaatgacactgcgaaagaagtgaagataaatgtttacaggtatcgttgaagaaataggtactgtaaaaagtattcgcactcaacaatccgtaaggacattagatatttcatgtcagaaaatcctagaagatatgcatattggtgattctataagcgtaaatggtgcgtgtttaacagtcattgattttcaacaaaatcaattttctgtccaagtgattaaaggtactgaaaataaaacctatttagctaatattaaagaaaatgatgaagtcaatcttgaacgagcaatgtcaggtagtggacgtttcggaggacattttgtattaggtcatgtagatgcaaaaggaacaattataaatatcagagaaacgcctaattcacgcattgtatctattaaggcatctgactcggttatcaaacaaatggttaagcaaggttctattactgttgatggcgtaagtttaacaatttttgacttgcatcaacatagttttgatatccatcttattcctgaaacaagacgttcaacgattctttctaacaaaaagatgggcgatgaagtgcatcttgaaacagatgtattatttaaatatgttgaaagtatagttggtaaaaataaatctgatttgtcagttgataaattaaaagcatatggtttttaggaggggcttaaatgaaattcgatagcattgaagaagcgttagaagcattaagaaatggcgatagtattattgtagtagatgatgaaaatcgtgaaaatgaaggtgacttaattgcggtcactcaatggatgaaagacgataccattaattatatggccaaagaagcgcgtggattaatttgcgctcctataagttcgcagattgctgaacgtctaaatcttaaaactatggttgatggtaatacagatgactacggtacaaatttcactgtaagtatcgatcatatctctactactacaggaattagtgcatttgaccgtacagcaacagcgaaagcgttaattaatcctgattctaaaccagaaagtttccataaacccggacatttatttcctttagtgtctaaggaaaaaggtgtattagttagaccaggacatacggaggctgctgtagatttagctaaattaacaggtgctgcacctgctggagttatatgtgagataatgaatgacgatggtacgatggcaaaaggtaatgaattacaacaatttaaagagcgacatcaattaaaaatgattacaattgaaagtttaattaattatcgtcgtaaacaagaaagcgaagatattgaacttaaagcaactgtaaaaatgccaacggatattggtaattttaaaatgtacggtttccaatctcaatatacacatgaagatattgttgtacttggcaaaggagaaccacgtacaactgaaaatgtaagactacattctgcttgtttaacaggtgatattttccacagtcaacgatgtgattgtggcgctcaattagaagcatcaatgaaatatataaatgatcatggcggattaattatttatttaccacaagaaggtagaggcattggtttaatgaataaactaaaagcttatgaattaattgagcaaggacatgatacggttactgcaaacttagcattaggttttgatgaagacttaagagattatcatatagctgctcaaattcttaaatattttaacgttcaacaagttaatttattaagtaataatcctaagaaatttgaaggcttggaagattatggtataaaagttgcagagcgtacagaagtgattgtgccagaaacggaacataatcatcattatatggaaacaaaaaaatcgaaaatgggacatcttatttaggaggaatttagaatgaattttgaaggtaaattagttggtacaaatttaaaagttgcaatagtagtgagtagatttaatgattttattaccaaccgtttattagatggagcgaaagatacattagtaagacatggtgtagatgaagataacattgatgttgcatatgtaccaggtgcatttgaaattccacttgttgctaaaaaattagcgcaaaaaaatgattatgatgcagtgattactttaggctgtgtcattagaggtgcaacatctcattatgactatgtttgtaatgaagttgctaaaggcgtatcaaaagcaaatgatattacgaatacaccagttattttcggtgttttaacaactgaaagtattgaacaagcagttgaaagagcgggtacgaaagcaggtaataaaggtgcagaagcggcagtaagtgcaattgaaatggcaaatttacttaaacagttttaattaatgcagagcgtctcgataattttaaggattatcgagacgctctgtatttcaacgttttagtaatttcacaacactagatactaatgtaagtgttcctaaagttagtccactaactaaaccaatttttttaagtgcttctgttgaaataaattcttgataggcaagggaaagattttgaggtctttcagccaggcgacgcatgaaataagcaaaccagtcattgccatatggaacataaacggtaaagtgatatccttgtctagcaatctcttctgctaattcattacgaaaaccatacaacatttgaaattcaaaagtgtttttttcaatatgatgatcttttacaaattgtttaacatggttaatgatgttatcatcatgtgttgcaattgacgtaaagtttttggcgttaagtaaacgtttttcaataatatttatataatttttgtcaatatcttttttactttgataagcaatcgtatcattttctttataagcacctttgaccagtcttaatcgtaattctgggtacttatcaattaatttttctgcctcaaaaaggtatccttgaataactgtaccgacatttctaaattctccttttaatctgtctaaaatttgtaatgtttgtgataagctattatatttttccatatcaatattaatatgcatattatcataggtattagcctttaataaaatttctcttaaattttggtaggctaactcggtatcaaattcaccgcctaatgaactcactttcaccgacatatgtgcactcacttgatatttattaatagcttccattatctcaagaatctcatttttagcttgagtcgctattgctttattattaacaaattctccaagattatctatagtaacatcaatatgtttagcgtttaaacattcaatcgtatcaatgagttgttctatagtattacccgcaacaactctattagcacccatagtcggtccgattcttttagccatttcatttaaatatgtactatttgataatgttatgaaaaaatctctgaataaagacatatctattcctccatcccactcttatctatctctataacaagtttagcatgaatatattacttaagaaagcgtttacataccgaagataacatccgtttaaattcattagtcataaattaagaaaatctaaatactgtttaacaacaattaaaggtataatttgatataatacatttgataaacattcaattagagaggattcaaaaatatgtggaagtgggaaacagaacatgacgctaaaggcgtaatcatcatagtacataatatgttagaacacactggtagatatgcgtatgtgattacgatgttgagacgtaatggttatcacgtaattatgggtgatttacctggacaaggtcaaacttcacgagctaacagaggtcaactgcaacgatttgaaatttatcatgaacagttagttgaatggataaaaattgcaaacgaatacaaattaccaacatttgttatgggtgttggattaggtggtttaattattctcaatttacttgaaaagactgaactacctattgaaggcatattactactctctccaatgcttgaattaaagaaaaattataaaacacgaaaaaatatgtttatatctaatattggaaagagctcaaaagatacacaatttaaattaggaatagattatgaagatttaactcgtaattcagaagtgattgatgagacaaatcatgacggattgatgttaaagaaagtatcttacaaatggtttaacattattaatgaaacaatgagagacacatcacaacatattaaagatatcaaaccgttacccactttattaatgtatggtactgaagataaaatcttagaaacgtcttcaatagatattttaaaacaacaatttcttgcagatgaattttattttaaagcgtggaaagggttttatcatgagattcacaatgaacctgaacgagatcaagtcatgagatatatattaactttcttgaataatagtgtaaatacaatgggatttattgtacaagaagaagacattgaggaaatataagataattttttaaaaacctataaaaatagctcgtagaagacagggatctacgagcctattctatatcaaaaatatggtgataatattataaatgagttaaaattacaatataagtagaattataactaccaattactttttataaattggatgaatttagtattagatttataatataaatgttgaattaaaaaatatagttgatatattattgaaaaataaattgtattgaatttttaaaaacgccaaatcgtataaacttaataataaattgaattataattattatacataatatgagagatcaaggggaatgaattatgaaattacaaaaaaagaaacggtatccatggtattgaaattagagaaattattgaaggatatagattctatatttagaattatttatgagaagtatcatttaaataaagaagaagtacttattttattaacgttatgggaaaaggggcctatgacattaaaagagatggatcaatatgttaatatcaagtcatataaacgaacaagaacgtataataatttagttcaatctgattgggtttacaaagagcgtcccattgacgacgaacgtacggttattatccattttaatgaagaaaaaaataaatatagaaatgaattattagattttattactactattattaaaagaaaatatgaatctttagaaaatagtttgaattcattgatgagcgtttaatataaaaaacccataaattaaaactacgatttgatgttttaatttatgggttttaaaatttagcgtttttcaatcgcacatataaaaggtgcatgattaacttgattgataaattgatattttaatatgtgtgctttactttgatcaaagttttcgagatattttaataattcatctctttcgatttgtccttccttatgtccatgataaattactagtacaataataccttctgtacttaatagtttaaaaatactttcaatagcttgaatagttgtttcaggtttagtaacaatagttttatcacctttaggcagatatcccaaattgaaaatagctgcattcacgtttccgatgacatcacttggtatatcatttaagatattttcatgtccatcatgtatcaacgtaacatgtttaaaggatgctattttttcttttgtatgttcaatagcttctttttgtatatcgaaaccaaacactttgccatttggaacctgttctgctaaaaatagggtgtcatttccattaccacacgtagcatcaataacaatgctatcatcttgaatatgttgattaataagtgttttagcaaaaggaagaatacgttctaatttcatgaattcaccttagtattagatgtgtaaaacttaccgtgataagattcacgacgtgctaattcatcatctatttcattgagaacttcccacttgttaacactccacattggtcctaccattaaatcaatcggtccatctccagtaatacgatgaataatcatgtctggcggaaggatttcaagttgatcacacactaagtttgtataatcttcttgagtcataaattcaagcatacctttttcgtattgtttgaccattggtgtacctttaagtaaatgtaataaatggattttaataccttgcacatccatttgtgccacttctcgtgctgtttccatcatcatatgataatcttcacctggtaagccattaataatgtgtgtacatacgttaatattatgtttacgcaatttagctacaccttcgtaatacgtttgcatatcgtgcgcacgattaattaaatcagaggttttctgatgaactgtttgaagaccaagttccacccataaataagtacgttgatttagttcagctaaatattcaaccacatcatctggcagacaatctggacgtgtagcgatagataaaccaataactccttcttcttttaacacaggttcatatttttcttttaaaacttctacaggtgcatgggtatttgtaaatgcttggaagtaagcaatatatttaccttcactccatttttcatgcattcgttctttaatttgttggaattgtacttcaattggatcggctctatttcctgcaaagtcaccactaccagctgctgaacaaaacgtacaaccgccatgtgcgacagtaccgtctctatttggacagtcaaatccgccatctagagcaactttaaaaattttctgtccgaatttattttttaaatggtaattccatgtatgatatcgtttattttcaaaggcatacgggaaatacttacccataacacattatcctttctatctaacttagttctaagtaaagattttaacatattttaatgttatagtgtttattatagttcgataaaaatataaagagaggacttaaaaattatgaatatacctagatcagtatggtggctagttataggaatggcattaaatataactggttctagctttttatggcctttaaatacgatttatatgaaagaagaattaggaaaaagcttgacagtttctgggattgttctaatgattaattcttttggaatggtagttggtaacttactaggtggaacgttgttcgataagttaggtggttaccgtacaatcatgataggtactattacttgtttgcttagtacaacattacttaatttctttcatggatggccgtggtatgcagtttggttagtgctacttggttttggtggaggaatgattgttccagcaatctacgcaatggctggtgccgtttggcctaatggtggcagaacaacttttaatgctatctacttagctcaaaacataggtgttgctgctggagctgcaatgggaggtttcgttgctgaatttagctttaattttatcttcttagctaatttaatcatgtacgtattatttggaattgtagcctttacgcaatttaatttagaataccatgctaaagtgaaatcaccagatagtctagatatccaaagtaaagaaaataaaaaacgttttatagctttaatattattatgtgccatgtttagtatttgttggattggatacattcaatgggaaacaacaatagcctcatttacgcaacaaattaatatttcaatgtctcaatatagtgtattgtggacggtaaatggaattatgattttagttgcacaaccattaattagaccagtcattcgtttgttaaaaggaaacttaaaatatcaaatgtttgttggtattttaatttttatgttgtcattctttgttacaagttttgcagaacaatttaccgtcttcttaataggaatgattattcttacttttggtgaaatgtttgtatggcctgcagtaccaacgattgccaattatttagcgccacaaggtaagcaaggtcaatatcagggtgtagtaaattctgcatcaactgtgggaaaagcatttggtcctctaatcgggggtatattggtagatacattcaatatgagtgcaatgttcataggaatgatcattcttttattaataggaatgtttttcttatctatttttgataagggtctatcgaaacaatcacaacatgaaaatcgttgaaagacaacttgaaaattaaacatataaaatatgatgaaccacttgcaattaggttacgaatctcataatattaaactgtattggagtagtaacttaaatacttttctaaagagagctagtggtggtgcaaactagcgttaagaattaagtgaacttaccgttaattaattgaatttaaaacatctcttactattataaagtgcacatgtaaaatgtgaatgagggtggtaccgcggctaaagaaagtcgtccctgtcaaaagtaatagtttgaggtgttttatttttattaggaggaaaatactttgggttataatcacaaagagattgaaaagaaatggcaaaattattgggctgagaataaaacattcaaagcaaacgataatttaggtcaaaaaaaattctatgcattagatatgtttccatatccatctggtgcgggattacacgtaggacatccagaaggatatactgcaacggatattatttctcgttataaacgtatgcaaggatataatgtattacatccaatgggttgggatgcctttggattacccgctgagcagtacgcgttagatacagggaatgatcctagagaatttactaaaaagaatgttcaaacatttaaacgtcaaattcaagaactaggttttagttatgattgggatcgagaagttaatactacagatcctgaatattataaatggacgcaatggatttttattcagctttataataaaggactcgcatatgtagatgaagttgcagtaaattggtgtccggcacttggtacagtgttatcaaatgaagaggttgtagatggtgtatcagaacgtggaggtcatcctgtatatagacgtccgatgaaacaatgggtattaaaaattacagaatatgccgatcgtttattagaagatttagatgaattagattggcctgaatcaattaaagatatgcaaagaaactggattggtcgttctgaaggtgcacgtgtgtcatttaatgttgaaaatactaatgacactattgatgtgtttacaacacgtccagatactatctacggtacaacattcttagtacttagtcctgaacatgcgttagtgaatgaaattactactgatgagaaaaaagaaatggttaaacagtatcaagaagaagcatcaaaaaaatcagacttagagcgtactgatttagcaaaagataaatcaggtgtgtttactggggcgtatgctattaacccgttatcaggtaagaaacttccaatttggattgctgattatgtattatcgacttatggtacaggtgcagttatggcagtaccaggacatgatgagcgagaccatgaatttgctaagaaatttgatttacctatcattgaagttatcgagggcggaaacgttcaagaagaagcatatactggagaaggtgcacatatcaattctggcgaactagatgggctagataataaagaagcaatttctaaagcaattactttactcgaagccaaaggtgctggcgagaaaaaagtgaattacaaattacgtgactggttatttagtagacaacgttattggggagaaccaattccagtgattcattgggaagatggtacgatgacaactgtgcctgaagaagaacttccattattacttcctgaaactgaccaaatcaaaccatctggtacgggtgaatcaccattagccaatattgatgactttgtaaatgttgttgatgaaaaaacaggcatgaaaggacgtcgcgaaacaaatactatgccacaatgggctggtagttgttggtattatttacgatatattgatccacataatgagaatatgttagcagatccagagaaattaaaacattggttgccggtagacttatatattggtggagtagaacatgcggtacttcacttactgtattcaagattctggcataaagtattatatgatttaggtgtagttcctacgaaagaaccattccaaaaattattcaaccaaggtatgattctcggtgaaggcaacgaaaaaatgagtaaatctaaaggtaatgttgttaatcctgatgatatcgtagcatcccatggcgcagatacattacgcctatatgaaatgtttatgggaccattagatgcagctatagcatggagtgaaaatgggttagatggctctagacgtttcttagatcgtgtatggagattattcattaatgaagatgggtcattatctaataaaattgttgaaaataacgataattcattagataaagtttataatcaaacagttaaaaaagtgacagaagactttgatactcttaactttaatacagcaattagtcaattaatggtatttatcaatgattgttataaagcgaataacatttacaaaccttatgtagaaggatttgttaaaatgttagcaccaattgcccctcacgttagtgaagagttatggcaacgtttaggcaataaagaaactattacgtaccaaccttggcctacgtataatgcatcattacttgtagatgatgagattgaaattgtagtgcaagttaatggtaaagtaagagcgaaaatcaatattcctaaagacttatctaaagaagatatgcaagagttagcattacaaaatgaaaatgttaaactatctatagaaggtaaagagattaaaaaagttattgctgtacctcaaaaattagtgaatatcgttgcaaaataataaaagaggagttttataatggaatcaattacagtagatcaattaaaagagaaaatactaggatctaatccagtaaatattatcgatgtgcgaacagatgaagaaactgcaatgggtacaattcctggtgctaaaactattccaatggatcaaattgctgataacttaaatcaatttaataaaaatgaaacgtactacatcgtttgtgctgcaggtgttcgtagtgaaaaagtagcgaactaccttgaaaatgaaggtattcatgcagttaatgttgaaggtggcatgcaagcatggggtgatgaaggtattgaaatagacagtatataatgatttatagatatttaaacaataatacagaaaaacagcgaagttatgattcttcgctgtttttttataatttaacttatttttaatatttttatattatttagttgtagtacttttaattttattatgatattatacttaagtgtgaatataatattatgtaagtgatagtaacaactatagcatacataaaacattttcattataacaattgacatcaagagagaacatcaaggaggaaacataatgaatctttttaaaaaacagaaatttagtattcgtaaatttagtgtggggacattttcaacgctaattgctacattagtgtttttatcacatcctggtcatgcagcaactcatgatgcagaaacaaatacaagtgctccacaaacgaatgaaagtgcgacgattaataaacaaaatactaatattgaacaaccacataatgaaacaacgtcagcaaatacatctaattcaaatgaaaataatcgaaataatgaaagtaatacttcaagtgattattcaattaaccgtgaacgtgaagaaggtacagtgaataatgtaattaatagcactgaaaataatacaaatcataatgagaaagtaacaactaatgacgtagttagtaatgaaaataatcatgaaactacaaacgttaatcaaccacatagaagagggaaacgttcagtagataacactcctagtactacaaatacagatccgatggctgtaaatgaacaaaatactggtcaaatcattaatgggacatttacagataattcacagggtgcgacgataccgactaagaatttagagtctgcaatgaatgaagcaaatactgtaccgggttggcatgtaaatagtaatgatcaaaccatcattccattaatttggggtcctaaatcgttgcccgcatacaatccttatatattcgataaaaccaataataaaattggtgtagtactatcaaaatataatggtaactttaatcaagttccaggtatagctgatcctacagtaggatcaatttaccaagatgttgatgttactcctggatcagaaatccaattacattatatttctagtagtatgaataatatatggggggttaatggtgcaagagtgtatatttacgatgcgaataatccttctacacttttatataaaggaactccggatatattacagaacccaattggtaactttgtaggtgtatttcaagtgccagaaacagtctcacgattaagattaagatttgaatcggcattaaatcgtagtactgattctactaatggacatagactccttactggtcctaataactttggaggcggagtgttagctgatgttaccattaatagtggcgcatatttaactgcgacagtaaataatacacactactttgcacaatctggatccataaatgctgatcgagtttatcaagaaatagggtttagaattgaaaatagaggacattctagttcaaataaaacagaatatacgattgttttaccagaagatgtgacatatgtatctacaaaaaatgctactggaaaatttaatgcagcaactaaagagttaacagttaaaatagatcgacttgaagcaggagcaagtaaaaatatttctataggattatccttaccaactgatcgaccaattgaaaaagaattcttaggacatttgacttatgttacagatggtataaatatgaataggttaagtgattctaaagattttggacgtaataatggtgatcactatacaagatacggtgtgcataatgaatttgtaagtgttgattctgctatgcgacaaggagatattgtattagataaacaaaccattacagttaaaatgtataagcaacatttgagagacaaagtaacagaaattgaggatgatttagccaatcttgatcaaaacgataattcacctgaagtatgggaagcaatgcaagtgatacttagaaaagctaaagaagtattagctgaaacagatgagatgcctataagtgaattgaaagatcaagcaacgattaatagtatcgatttaaatttagataaagcacatgctaaattatcattagacaaagttgcaagaactaaaagagcgctctttatgggtaacgatacagctacaattgaagaaaaaaatgctgtgattgagcaagtgaatcaagcactacaatctagttatacaactgttgatcaatcaatgacttcaaatgatgtagcaacaaataaagacactggaattaatgaaattacaatgattgatcttactccaacagtaaagcaagcagcaattgatgaattaactgaaagagcaaatgctaaaaaagtagagtttgataataatcctgatgcaacagtagaagaaaaagaagctgcaaaagcaacgattgataatttagtgtcagaggctacaacaaatattatgaatgaaactacaaataatggtgtagcgcaacaaaaaacaagtagcatagatagtgtgaatgctgctactataactccaactgttcgaagtaacgctagaacagcaatagataatatagcatctgcaagaaaagttgaaatagataaggataataatgcaactttagaagaaaaaaatgcagccaaaactgaaatagacaatttagtagctagagcaaaagcagatattaacagtctaaatcacaataatgaaattgaaatattaaaagaaaacaaagtaaacgagatatcacaagtagtagcgcatccagtaaagaaaaatgctgctacacaagcaattgatcaagccgctatagctaaaaaacaagcaattgatttaatagaagatgcgactatagaagaaaaagaagtcgcaaaggcaaaagtagataaaatagtaatcgaagctaaaaataacattaatcaagcaactactaattcaagtgtagatgatgcacaaaatgaaggaataactgcaattaatgcagttactccagaagtggttaaaaaatcagatgcaagagatacaatcgatgaggtagcccgaattaaaaaagcagcaattgatcaaacacctgatgcaacagtagaagaaaaagaggcagcaatagcgaaaatagatcaagaggttactaaggctaaggaacaaattcatcaagcactaaaaaatgaaaatgtagatactgctaaaacaaatggtacgaattttattaatgcaatccaaccagaaattacgaaaaaaatgaaagcaagagagacaattgatgaagtagctagagctaagaaagaagcaattgatcgaacactagatgcgacaacagaagaaaaagaagctgcaaaagcgaaagtagtccaagcggtaacggaagccaaagctcatatcaatgaagcaataaataattcaggtgtggatgaagcaaaaacaaatggtacaactacaatcaatgcaatccaaccagaagtaatcaaaaaatcagaannnnnnnnnnnnnnnnnnnnnnnnnnnnnnnnnnnnnnnnnnnnnnnnnnnnnnnnnnnnnnnnnnnnnnnnnnnnnnnnnnnnnnnnnnnnnnnnnnnnccaagcggtaacggaagccaaagctcatatcaatgaagcaataaataattcaggtgtggatgaagcaaaaacaaatggtacaactacaatcaatgcaatccaaccagaagtaatcaaaaaatcagaagcaagacaagcaattgatgatattgcaagagctaagaaagaagcaattgatcaaacaccagatgcgacaacagaagaaaaagaggcagccaaagtaaaagtagaccaagcagtaacggaggctaaagcccatatcaacgaagcaataaataattcaggtgtggatgaagcaaaaacaaatggtacaactacaatcaatgtaatccaaccagaagtaatcaaaaaatcagagtcaagacaagcaatcgatgatattgcaagagctaaaaaagaagcgattgatcaaacaccgggtgcaacaacagaagaaaaagaggcagctaaagcgaaagtagaccaagcggtaacggaagccaaagcccatatcaacgaagcaataaataattcaggtgtggatgaagcaaaaacaaatggtacaactacaatcaatgcaatccaaccagaagtaatcaaaaaatcagaagcaagacaagcaattgatgatgctgcaagagccaagaaagaagcaattgatcaaacaccagatgcgacaacagaagaaaaagaagctgcaaaagcgaaagtagaccaagcggtaacggaagccaaagctcatatcaatgaagcaataaataattcaggtgtggatgaagcaaaaacaaatggtacaactacaatcaatgcaatccaaccagaagtaatcaaaaaatcagaagcaagacaagcaattgatgatgctgcaagagctaagaaagaagcaattgatcaaacaccagatgcgacaacagaagaaaaagaagcagctaaagcgaaagtagaccaagcggtaacggaagccaaaacgcatatcaatgaagcaataaataactcagatgtcgatgaagcaaaaacaaatggtacgaatacaatcaatgcaatccaaccagatgtgctaaaaaaagctgaagcaagacaagcaattgataatgaagttattaataagaagacagagatcgacaataatattgatgcaactatagaagaaaaagaagccgcaaaatcaaaagtagacgaagctgcaatagaagcaaaaaataatattaatcatacagaaataaatcaagctgttgatcaagcaaaagaagatggtgttacaacagttagtcatattcaaccaaatatagttaagaaaaaagcagcaaagactgcaatcgatgaagtagctagaattaaaaaagaagcgattgatcaaacaccgggtgcaacaacagaagaaaaagaagccgcaaaatcaaaagtagacgaagttgcaacagaagcaagaaataatattaatcgtgctttatctaataatgatgtagatcaagtagtacataatagtacggcatcaataaataatatccagccagatatagttaaaaaagaacaagcaaaacgaggtatagatactcaagcaaaaatcaaaaaagccatcattgatcaaacatctgatgcaacaacagaagaaaaagaagcagcgaaatcaaaaattgatgaagaagttacaaaagcaaaacatagtattgatcaagcagtaacaaatagtgatgtagatcaagcaaaagatacaggaactgttgctataaataacattcagccagaaattgtaaaaaaagagacagctaagacttctattgatcaaattgcattaactagaaaaaacatcattgatcaaacacctgatgcaacaacagaagaaaaagaagcagcgaaatcaaaagttgatgaagaggtaacaaaagcaaaacgtaacattaatcaagcagttacaaataatgatgtgaatcaagttgagcataatagcacaatagcaattaataatatccaacccaatattattaaaaaaattgcagctaaaacgttaattgatcaagtagcaagagctaaaaaaaataatattgatcaaacatcaaatgcgacaatagaagaaaaagaagcagcaaaacaaaaagttgacgaagaagttacaaaagcaaaacatagtattgatcaagcaataacaaatagtgatgtagatcaagcaaaagatagaggaaatgttgctataaataacattcagccagaagttgtaaaaaaagagacagctaagaatgctattgatcaaattgcattaactaggaaagccatcattgatcaaacacctgatgcaactgaagaagaaaaagaagcagcgaaatcaaaaattgacgaagaagtcataaaagcaaaacatggaattgatcaagcaaaaacaaataatgacgtagatcaagttgaacaaaatagcactacaatgataaataatattcagccgacagtagttaaaaaatcagaagcaagacaagcaattgatgatttagctaaacttaaaaaagcaactattgatttaacgcaagaagcaactgaagaagaaaaagaagcagcgaaaagtaaagtggatcaagcgttaacagaagctaaaactcatatcaacgaagcagaaaatgatgaaggagttgatgaagcaaaaacaaaagggataaatgttattaatacaatccaacttgaaattataaaaaaagtagaggcaaaacatgaaattgaccaatctgcaattgctaagaaaaaaattatagatcaaacaccagatgcaactgaagaagaaaaagaagtagcaaaacaaaaagtagatgaagaagctacaaaagcaaaagataatattgatcaagctacaacaaatgatgcagtggatcaagcaaaaacaacaggaaatacagagatcaataatattcaaccagaagtggttaaaaaatctttagcaagacaagcaattgatgaagtagcgaaagtaaaaaaagaaaaaattaatcaaatgctagatgcaactgaagaagaaaaagaagcagcaaaacaaaaagtagatgaagaagttataaaagcgaaaaataatataaatcaagctacaacaaatgacggtgtgaataatgctaaaacaactggtaaaaatactattgaaaatatacaaccagaagtagttaaaaaagctgaagcaagaaaagcgatagatgaagcagcaactcttagaaaaaatctaattgatcaagataattcgacaacaaaagaagaaaaagacatagctaaacaaaaaattgatgatgaggttaataaagctaaaagaaatgttgatcaatcaataaataattccaatgtagatcatgcacaaattaatggtataagtgcaataaataacattaatgcggtagctttgaaaaaaacacaagccaaaaaatctatagatgatgaagtaacagcaaaaaaagcagaaattgatagtaatcatgaagcaacgaatgaagaaaaagaaatgacaaaacgtaaagtagatgaagcagcaacaaaagcgaaacataatgttgatcaatctacaacgaatgatacagtagatcaatcaactcaaattggaatttcaattatatctaatattcaaccagagacaatacaaaaatctttagctagacaagcgatagatgatgaagcaacaattaaaaaagcagaaattgagaataatcacaatgcaacaaaagaagaaaaggatgtggctagacaaaaagtagatgaagaagttataaaagcaaagaataatattgctcaatctacgactaattctgatgttgaaatagccaaagaaagtggtaaacatgctattgatgaaattcaaccagaaatagttaaaaaatctgtagctaaacaaactatcgacgaattagctaaacaaactatcgacgaattagctaaacaaaagaaagcagaaattgatcaaacaccaaacgcaacaaaagaagaaaaggatgcagcaaaacaaaaagtagaagaggcagtaatgagagctaaaaaactgctcgaaggtgccaatactaactcagatgtcgatcagactacagagcaaggtaaacaatcaattaatagtattcaagttgaagttattaaaaaagcagatgctttatctaaattagaagtggaattacaaaaattaaaagataaagtatcatctgatcaaacatttacaatagatgaaaaactattcataaaacaaaaacttgatggatcatataaaaaagcagaagaaaaagtaaaccaagctcaaactaataaacaagttgataatataaaaatacattatcttcaagaatttaataaaatagttctaatcgacaaagtaaaattgaaagctaaatctcaaatctttgatgtagcaaataaacgtaaagcgtatattaaaggattaacaaatatatcagaatataatagaaataaagcttataaacaaattgatgtttatgttatgaaagccttaaataaattagctgaaaatgtgactactaatgatattaatgaattaacgagagtgactattaatgagattgaacatgtgaatgttaagcaatttgaaaataactttggattggttaatgacaacaaagttacatttaataattttaataataaatttaatgtgaataataatcattcaaaattaaatactctaccttatacaggtgaaaatgaaaactcattattatctttagctgagttcacattattaagtggtctgctattattattaaaacgaagaaaaaaagaagataaataataaaaaataaattcagttatcttcgtattcaaaatatgaaataaaaaacactccaaaagttataattttacttaacttttggagtgttttttatttttaagtatatataaattgtctagcttcgcttccagcgacgtggccggtaactaaagcacttgtaatattgtagccgcctgtatacccatgaatgtctaatacttctccacataaaaataaaccaggttgaatttttgacatcattgttttaggccatatttctttaagagaaacgccaccacccgtaacaaatgctctttcaattgaaagggtaccattaacagtgaaaatgaattgtttgaaatgttctgcgaggtgagtcaactgtggatttgaaagatgatgaaatgttgtattttcattaatatcagcctgttctagcataaacaataaatatctttcttctattaaaccacgcagtgcattttttatatatttgtctggttcttcgcttaagattttctttattttattttctaaatcttgtaaagaaatctctggaaatacatctaattgtaattgtatgtcttgttttttctgatttttttgttctttataaacgaattggctacaacgtaatgcagctggtccacttacaccaaagtgtgtaaaaatcatatccatttgatgactaatacgttttttaccatttttctttaaaactgataattctacattttttaaacttaagcctttaagtgttttatttttaataaaagattcactagatgtaataggaacttcagtagggaataattcagtaatagtgtggcctagatttttagcaaatctgtagccatcacctgtggatccagtttgggggacgcttgttccaccagtcgcaataataactgtttttgattcaaattcgccatcttgtgtttttactataaaagattgatcatttttagaaatgtcattaacaacagtttcttctttaatttcaacgttgttattcttaattgtattaactaaagtatcaacaatatcttgtgatttgtttgaaactggaaacattcttccatgatcttcttcttttaattttataccacgactttcaaaaaattctattatggattcgttatcaaattttgaaaatggactatataaaaatttaccatttcctggtatatttttgatgatttcttcgtaaggtagacgattagtcacattacatctaccaccaccagaaatttttaattttcttccaagaccttttttcttttcgattaatagaaccttactactattttcactcgcagcaactgctgccattaatccacttggtccaccgccaatgattattgtttgatacatatattaacctccgttatcatacatctatattctacataaatacttattattttgcgaactgaagtagaagtttgccttaaaaagtgtattaaatacataaataaaagaacttacaatatttttagttaataatagtgagaataattgacaaaaaaacttaaaaagaaacgagaaacaataagtattttgtgatatattttatagtaatgcaagtccttagtttagacagatgtataacgacatagtttgattaaattaaagataggaagattgaatatgagtgaaaataaggaaatggtgcgcggaacctttttgataacatttagtattttaattactaaaattctaggtgttttatttgtaattcctttttatgcgattatgggtgcaaatgcggaggaaaagttagcgccatttaactatgcttatgttccttataatattgctattgctgtcgcgacagctggagtgcctttagcagcttcaaaatttgtagcaaagtataatgcaataggagcatatagagttggacagaaactctataaatcgagttttatcgtaatgtcgatatcaggtattataggatttttaatattgttttatttagcacctgatattgcagttattactttaggtcaaaaagaaggaaaaggtggatggacagtaccagagattacttggattattcgtatcatcagtatagtagtggtttttatcccactattagcaacatggagaggggtattccaaggttatcaatcgatggggccaactgctgtatctgaagttactgaacagttagccagaattatatttatattaataggtagttatttagttttaaatgtttttcatggtacatatttacaagccaatggtgtagctacattcgcagccgctgtgggagcaattgcaggtttatttactctttggtattactggaaaaaacgtaaacctcacattcaaaaaatggtagagtctgatcgtacaggattagacatttcttatggaagaatgtataaagaaattattgcatacagtattccgtttgtaattgttagtttaaacttcccattatttaaccttgttgatcaatttacacataacaatgcactagatgcagcaggattccatgcaaataaagattatttctttacgatattaaactttacaaccaataaaattgtaatgattccaacatcacttgcagcaggttttgcggtaagtttaataccatatattactaaaacatatgcagaaggtcgtttaactgaaatgcatcgtcaaattaaaacatcaatcggtgtattaatgtatattacagttccagcaagtttagggataatggcactggctgcacctttatatacagttttctatcaatataatccagatggaaacaaaatgttatttatctatgcccctgtagcaatattaatttctttacttagtgttactgcttcgatgttacaaggtatagacaaacaaaaattgacagtgtttgtaattttaggagccgttgtattaaagttagcacttaatattccattaattatgactttccatactgcaggagcaattttaagtactgctattgcattgagttttgcgattacagcaaatttctttattttaaaaatatatgcgaaatatgaatttacagaaacatttgtgcaagtagcgaaaatttttatttatagtttaatcatgatgattagtgtggaaattgtttacttaattttaggtcattttgtccctgtagaacgtaaatttggagcaatgattatattactcgttggggttattgtaggtgctttagtgtatggtagtatcacaattaaaaatcgattagctgatcaatttcttggtgaattaccagaaaaaattagacgtaaagttggatttttaaaatgagattagataaatttttatcgaatatgggagttggcacgcgtactgaggtaaagcagcttttaaagaaaaatagtgtcaaagttaatgataaagtggaaaaatcacctaaataccaagtgaatcctgagcaagatgaaattactgtagatggcaaaataatagagtatattaatcatgtttatattatgttaaataagcctaaaggatatgtttctgctacttatgatgatataaatcaaacagtgatagatcttattgctgattaccgccatcttgatatatttccagtaggcagactagataaagatactgaaggtttattacttattactaatgatggacaatttaaccataatttaatgagtccatctaaacatgtgtctaaaacttataaagtaacctctaaataccctattaaaaacgaagatattattgcttttaaaaatggaattgaattatcagatggcaaagtaaaaccagcacaacttgaaaaactagatcataatttatctttagttactatttatgaaggaaagtatcatcaagtgaaaagaatgtttcattcaattgataatgaggtattagaattaaaacgtcttaaaatttctaatttgacgttagatgaaaacttaaaatctggagagtatcgtttactaacttcagaagaattaaaacttttatagtaataaaagagaaaaggggtaatatgatggctaaacgtgcaggtttattaagaattgtggcaggaattggtgcagcagcagctgcagtagcattatcacgtgaaagtagcagaaataaattaaaagctgagtataataaatataaagaaaatccagaaggctataaacaaaatgcgaaaggactagttaatgatattagttcaaaagcaaatgaaacaattcaaaatgtaaagaatgacccacaaggttatgcaaatcgtttaaaaaatgatcctaaatctttattacaagatgaaaaatctaaattcactaatgtgaatactaaaaaaaatgacacacatgaattagcagaaggtaaattcgatgatgaaggtggcgcaactgttaataataatttaagagtagtcactgaagaagatttaaaaaacaatcataatgccttagatgatagacattaaatttaaattttaaagaagtgagaaaattttttctcacttctttttttatatactatgaaattttctgacatcttgttgtcatttaatactagatttatgtaaaataataggtatatctattgaaaaggaagttgatctctaatgtggaaagaaaaagtacaagaatatgaaagtcaaattattgaagatttaaatggattactttcaatcaagagtgtgagagatgataatcaagcttcagaggaagcaccagttggtcctggccctcgtgaagcgcttgattatatgtataaaattgctcaaagagatggtttttctacccatgatgttgatcatattgctggaagaattgaagcaggtcaaggtgaagatgtattgggaattttatgtcatgtagatgttgttcctgctggagacggttgggactctgatccatttaaacctgttgtaacagatgatgctattgtggcaagaggtacacttgatgataaaggtccaactatcgcagcttactatgcagttaaaattttaaatgaaatgaatgtagattggaaaaaacgtattcatattattattggtacagatgaagaatctgactggaaatgtacagaaagatatttcgaaacagaagaaatgcctgctttaggttttgcaccagatgctgaattccctgctattcatggagaaaaaggaattacaacatttgatttagtccaaaatgtaagctcacctcatactgatcattcagaagcaacacttctttcatttgaatctggtcaacgctataatatggttcctgatcatgctaaagcacacattttggttgaaaaaaatatgacagacgtagttcaacatttcgaatattatctagaccaacaacaattagaaggtgaagcggttgtagataatggtgaattggtattaactgttgaagggaaagccgtccatggtatggatccttcacttggtatgaatgctggtttatatcttattgacttcctatcaactttgaatcttaatcaaactgcaaaagaattcgctgaatttagtaatcgttatttacatgaatctcattttggcgaaaaaatgggtatgaagttccatactgatgtcatgggagacgtgacaacaaacgtaggtatcattacgtatgataaagaaaaaggtggcaaatttggtatcaatttacgttatcctaaaggcttcgaatttgaaactgctttagaacgttttaaaaatgaaattaaatctcaagggtttgaaatagaattaggtaaagttcaacaacctcattttgtagataaaaatgatccatttgtacaaaaacttgtcactgcttatagaaatcaaacgggtgatatgacagaaccttatacaattggtggaggcacttatgcacgtaatttagacaaaggtgtcgcatttggagctatgtttgaagattcagaggatttaatgcatcaaaagaatgaatatattactaaaaaacaattattcaacgcaacaagtatctatttagaagcaatttattcactatgtgtggagggataaataatgacaaaagtatttattaacggagaatttttaaatcaagaagacgcaaaagtttcttatgaagaccggggttatgtatttggagatggtatatatgaatatattcgtgcatacaacggtaaattatttacagtaactgaacactttgaaaggttccttagaagtgcgagtgaaattcaaatcgatttaggttatactgtcgaggagctaacagatattgtaagacaacttttaaaaatcaatgacattcaaaatggtggaatttatattcaagcgacaagaggtgtagcaccaagaaaccattctttcccaactccagaagttaaacctgttattatggcatttgctaaaagttatgatcgtccatatgacgactttgaaaatggcattaatactgtaactgttgaagatattagatggttacgttgtgatattaaaagtttaaacttattaggaaatgttcttgctaaagaatatgcagttaaatataacgcaacagaagccattcaacatagagaagaaactgttactgaaggtgcgtcaagtaatgtgtatgcgattaaagatggcgaaatctatacacaccccgttaataattacattttaaatggtattactcgaaaagtaattaaatgggttgctgaagattacaacataccatttaatgaagaaacatttacagttgatttcttaaaaaatgcagatgaagtcattgtgtctagtacttctgctgaagtaacacctgtcgtaaagattgatggcgaaattgtaaatgatggtaaagtaggtccaattactaaaaaattacaagaaggattcgaaaaatatattgaatcaaaaagtatcaattaactttaaatttcttcaacgatgatgtatatgatatgttataatatttataaagcattcgggattttagctttttcatactagtaaaatgtatcattttgtttctcattttcagttgaaaaatcaagctaaaaattataaaatcatcattgagtgattaaagagataaggtaaaaaattcaaataatttggggacatttaaataataattttaccattataacaaaaacaaagttagaaatataatcgttagataaaaagcgatgattaaattagatatatggctcttgaaaaactatatttctcgagccattttctagttgaaagtgaggtgaacgagttggagcagttttatcaattagggtggacgcttgattctgcaggtggagcatctggagaggcgtatatggctgaacaagatggacaaaaattatttcttaagcgtaactcaaatccatttattgcagcattatctgcagaaggtattgtgcctaagttagtttggacaaaacgtattgaaacaggcgaagttgtaacagcacaacattggaaaaatggtagagaacttacatcatcagaaatgtctcaaagaagagttgctgaacttctcaaaaaaatacatggttcaaaaccactacttaatatgttaaaacgtatggaaatggaacctattaccccaaatattatgttaaagaaaattaatgcttctttatctagagacgtattaacccatcatattattcgaaaagcattaacttacttggaagaccatattcctaatttagattcacgtttctttacagtagttcatggtgatgttaatcataataactggttactttctgatcgtgatgagctatttttagtagattgggaaggtgccatgattgctgatccagccatcgatattggtatgctgctatacaactacgttccaaaacaacaatggtctaactggtttaatacttatggtgttaaagaaagtatggacttaaataaacgtatgaaatggtatactgtgattcaatcaatcggcatgattcaatggtatgaagaacaaaaaagatttaaagatatgaacacatggctcaaatttttaaatgaggtaatgaatagtaatttatttatttaaggagatttaatacatgagagtccgttataaaccatgggcagaagattatttgaaagaacatcctgacctagtagacatggatggttcacatgctggcaaaatgagtgattggtttgataagaaacagccaatctatattgaaatcggttcaggaatgggacaatttataactacacttgcagagcaacatcctgaaattaattttgtttctttagaacgtgaaaaaagcgttatgtataaagtgcttgataaagtaaaagataaaggacttacaaatttaaaaatgatttgcaatgatgcaattgaactaaatgagtactttaaagagaatgaagtatctagaatttatttaaatttctcggatccttggcctaaaaaaagacatgcaaaacgtcgtttaacgtatcgaacttttttagctttatatgaacaaattcttaaagaagatggagaaatacattttaaaacagataatagaggtttatttgcttatagtcttgaaagcatgtcacaatatggaatgtattttacaaagttaaatttaaatcttcatgatgaagatgatgaagataatatattaactgaatatgagaaaaaattttctgataaaggttcccgtatttatagaatggaagccaaatttcataaaaattaataaataatatattaaatccaacacacgagcgtaagaagaaaatacattcttacgctcgtgtgttgttttatcatttattgctctttatgatacatataagtacatatgtgctaaatacattgttatttaaatttatggataagtacatatgataaacatccaatgcaatatgtaagaaaaaaagaaaaatttagtccatatttcatccaaaatgattattgatttttgtattatcatagtaatcgttactttactgttaagttcgaaaatgataaaaaattaataaaaacatcaaacaaatgtaatttaaaatataaatatgaagtgaaaaaagtattaaaatattttttaaatatcaaaaaataatattaattttcttcaatagtaagtatttcacctgtgtgtgcatcagcatagaaggtatactctatatcacggttgtttttattttgagtaataccaccttgataaacaaaacgatttaaatattgctctttattttgcaaaggttcatgaagaatgtaagaacctttaatatccataaaatatgattttacttcctctaatattctatccggattttttacttttttgtttttcaatgtatgatagagtataaaagccgtagatgctcctatagttattacgatgggaatggagatatattttatagtttgacgagtcataattatcgaatctaacctttctattaatagttcttattattagtttaccataatcaaaatgatataataaatttaaggagtgtgtttatgtaatggaaaatgataaaactttacttcgtataaaaacattaacagaattacatggagcgccaggctttgaagaagaagtacgtgactacatgaaaaaagaaatgaccccatttgtagatgaagtgataaccactcatatgggaagtgtttttggtataaaaaaatcaaaaaaacaaaatgcaaagcgtgtgatggtagcggctcatatggatgaaattggctttatgattacgaacatcactcaaaatggcatgttacagtttactaacttaggcggtgtatctaatgatatatggcaaggacaacgactgcaggttaaaaatagaaatggtgaaaaaattgtaggcgtcgtttcgaatataccaaaacattttagaacaggtaatgaagcggttcctgagattaaagatttaatgttagatataggagcagaaagtgataaagaagttcgatcacgtggaatagaaataggggacacaattgttccttttacaccattcactcaattatctgaacatcgatatagtgctaaggcatgggataatcgttacggttgtgtcttagcaattgaaatattagaattactcaaagatgtagaattagatgtagatttatatgtgggtgcaaacgtccaagaagaagttggattaagaggtgcgaaagcatcaactgaattaatacaaccagatatagcattcgttgtagattgttctcctgcaaatgatattaaaggtaagcagcaattatctggtcaattaggtgaaggaacattaattcgaattaaagatggtacgatgattctctctccacgtttcagagactatctactggagttagttgatacatttgatattcgttcacaatattatatttcaccaggtggtacagatgggggagaaatccataaagcaaataaaggtgtacctacagcagttataggtgtatgtgcacgatatattcatagtacagatgcggtatttgatattagagattattatgctgcgcgtgaattattaaaacaagctgtgagtcacttaacaaatgaaaacattttaacattacaatttcaaagtgaggagaaataatatgattacattagaaactgaaaaacaatttgaagaattaaaaaatgaacaaacggtatttgaatttacagctggatggtgtccagattgtaaagtgattgaaccagatttaccgaaattagaaaaaaaatactctaattttaaatttgtatcagtagatcgagataaatttatagatttagcaattgaaaatgatatcatgggtattccaagctttctcgtatataaaaatggtgaattaatgggaagttatattggaaaagaacgaaaatcaatcgaacaaatagattcatttttaagtcaatatgtgtaaatgagtaattaggacttaaattttcttatctatatgaaagaatagcctaatttttctgtaattgaagctctttttattgtaaaatattgtaaggtgcgaaaataggagtgttttaatatgaacgtctttcaaatgagagatacattaaaacaacgtttaaagcatttagacgttgattttaagtttgatcgtgaagaagaaacattacgtatatatagacgagataattttaaaggcgtaactatcaagcttaatgcaattgtagcaaagtatgaagaacaaaaagagaaaatcattgatgaaattatctattatgttgaagaggccattgcgcaaatggatgataatggtctatctaaagtgaaagatattcaagttatgcctgtaataagatcaactagttttgataaaaaaactaaagaaggtcatcaatttgttattgaagaacatactgcagaaactaatatttattatgcacttgatttaggaaaatcgtaccgattaattgatgaaagtatgttaaaaacactaggtttaacttcacaacaaattaaagaaatgtcgttgtttaatatacgtaaacttgagaataaatataaaacagatgaagtaaaaggaaatattttttattttatcaattcaaatgacggatatgatgcgagtcgtattttaaatacaaaatttttaaatgaaattgaagctcaatgtgaaggtgaaatgttagtcgctgttcctcatcaagatgtattaattattgctgatatacgcaataaaacaggctatgacgttatggcacacttgacgatggaattttttactaagggacttgtacctataacgtcactttcatttggttataaaaaagaacatttagagccgatttttattttaggaaaaaataataagcaaaaaagagatccaaacgttattcaacgtttagaagctaatcgtaaaaaatttaataaaaaataactaataatacgtcaaaaggagaatttaaatgaatttattttataataaagaaggcgtaggggacgttgcatttttacaaattgaaccaacagatgggccttttgaatatgaaataaaaaataatgtggttgctattaaacatgaaaatcaaattgttggatttaatattttcgatttttcaaaagtatattcagttaatagtaatggtcatattaaattaaatgaaacgcttgtagaagctatacagcaatcaattacaaatgcaggttttgattatcaacttgaagcggatttatcacctaaatttgttgtaggctatgtagaaactaaagaaaagcatcctaatgcagataaattaagtattttgaaagttgatgttagtagtgaaaaactacaaatcgtgtgcggtgcgccaaatgtagaagcaggtcaaaaagttgtcgtagctaaagttggtgcagttatgccaagtggcatggtaattaaagatgctgaattacgtggtgtggcatcaagtggtatgatttgttcaatgagagaattgaacttgcctaatgcacctcaagaaaaaggaatcatggtattgtctgatgattataaagtaggcaatgcattttttgattaaaaaaactaggaaggatgtggatgtatgagttggtttgatgaattatttggcaatgataaacattctgatgaagaattactaagacgaaaaaataaacgtcgacataactcagaaacacaaaagaatggtgagcataccttacttcctgaaaatgatgatatctatgatcgtccgcgtggaaaatttcgttttcctattgatttagggcaagatgctgaaacatatgatgaagcggtttacagagaagttgatgaagatgaatatatgtcgcagaaatcatctaaaagtgataaagaatttggttatgacgcttatagttatgatgaaatagataataatgactatcctcaaacttatgatagtgcaacagatactcgaagacgcagaagaagacagtatacaaatcatgatgatactggagtgccttcaattaaagaaagaccttctaataaacgtaataagtcgttgaatagtgcacaattaaatgaaaacaataatagaaaaacgacttctcaatatcataagtatacaaataatcattctcatgtgaaattacaatcggagcgttttaaatcaaactataaaacgacatcgaattctacatatcaccattcaagctttagaacttcagaagtaccatctgcagtatttggtacaaaaaaacgccgaccaattgaaaatggtgttatccctccattaaaagagaatgaaaatgatgataatcataatgacgataaaaataattcaacacaagatcaaacagcacaacgagtatctgataatgatgtaaaaacaaatataagcaagtctaaaaatgaaccgttgaatcaaactaagtatgaagatactgatgtttcaattattaatgatcaaaattctaatatttatgaaactacatcttcaaaaagtaaagttcctaatttttctcaaaaagataatacggtgaatattgagaatatttatgcgtcacaaatagtagaagaaattagacgtgaaagagaaaaaaaagcacaacaaaaacgtaaatttaaagaagctttacagaataagcgtcaacaatcatcggatagtgataacgaaatccaaaaagtcattgatgaaatgtatgcaaatcaagctaagcagtacactggagagagttctctagatcatgaagaaaataatgatgaagagagaacgacacatacagaagatagtactgataaaatggaagacacaaatgagaatactacggataatcatgtgattgatgaaaggactcaaactgattcaaatacgtctaattatgatgacgatgacgagcagtatcaatatgaagaaattgatttgaaatctgtcccaaatattcaaactgttaatgataaagatgtagaaatacgagaagttaatgatacgacatctacagacgaacataatgatgatcaattgtcagaagataatcttaacgtagcacctatacattcaactaaagataaacatcatcattttaataaaaatgaagatgctcatttaagtaaagttaataaattgcaagaagataattatacttcaaaagaaaaagtagaggaagcaaagtatcatgagatgaacgtttcttcgaatgaagatataactaaacaatcaaatcataacgatgatgacattgaccattcaattgataatgcaattgaaacagatactgagtatgcttctgaacaagttgaacataacaatgattcagttcatgactcatcatctaacactgaaggggaaaaattagaagatgatgacaaacaaatcgttgaaaatgaggatgtttcatcatctattaaatcttcaatcattccgggtagtaaaccttttaacgttgtgatgacgccatctgacaagaagcgtttgatggatgctaaaaaattcaaaaaatctaataaagttaccgttccagaattaaaaccagaaacaaaattggaacgtaaatcagttagtataccaagttcaagtccatcagtaaaagcgactaataatcatgaagagcatattaaaaagaatattaatgaacaatcacttcaagataatcaagaagatgaaacgagtgaactttcaaatgtacaaaatgaaaatacacaagccatatctatgacattaaatactcagaatgaagagcaagatgaaaacgaacaacacgaaagtaaagctacgattagaaaaggccctaatattaaattaccaagtcttgaattattagaagatccggaaattcatcaaattgataactcatggattgaagagaaaaaacaagaattaaatgatgcgttttattactttaatgttcctgcagaagttcaaaatgtgactgtaggtccaagtgtaacacgatttgagttagctgttgaaaaaggtgtgaaagtttcgagaattactgctttgcaagatgatttaaagatggcattggccgctaaagatataagaattgaagcacctattccaggtacaagcttagtaggtattgaagtaccaaaccaaaattcttcaaaagtaagtttaaaatcaatcttagaatcacctaagtttaaaaatacggaatctaaattaacagtggctatggggaatcggattaataacgagccattattaatggatattgctaaaacgcctcatgctttaatagctggagcgacaggttcaggtaaatctgtatgtattaacagtatattaatgtcattattatataaaaatcatccagaagaattgagattattattgattgatccaaaaatggttgaattagcgccatataatgacttaccacatcttgtttcaccagttattacagatgttaaagcagctactcaaagtttaaagtgggctgttgaagagatggaaagacgttataaactgtttgcaaaatatcacgtacgtaatattactgcttttaataaaaaagcgtcttacgaacaacgtatgcctaaaatagtcattgttattgatgaattagcagatttaatgatgatggctccacaagaggtagaacaatctattgctagaattgctcaaaaagcgagagcatgtggaattcatatgttagtagcaacacaaagaccttcagttaatgttattactggacttattaaagctaatataccaacccgtattgcatttatggtgtcttcaagcgtggattctagaactattattgatagtggaggcgctgaaagactattagggtatggtgatatgctatatttaggtagtggtatgaataaacctatacgtgtacaaggtacatttgtctctgatgaagaaattgatgatgtcgttgatttcatcaaagcgcaaagagaaccagaatatttatttgaagaaaaagaattattgaaaaagactcaaactcaagcacgggatgaattatttgatgatgtttgtagttttatggtcaaagaaggacatatatctacttcattaatccaacgacatttccaaattggttataatcgtgcagcaagaatcgtcgatcaattagaacaactagattatatatctggagcaaacggctctaaaccaagagatgtatttattactgaggcagatttaaagaaagattaattttaaaggagttttatggatatgacgcattatcattttgtcggaattaagggtgcaggaatgagttcattagcacaaattatgcacgatttaggacatgaagttcaaggttcagatattgaaaaatatgtatttacagaaggagcacttaaaaataaagggattaaaattttaccatttagtgtagataatatacatgaaggaatggtagttattcaaggtaatgcatttcctgatacacatgaagaaattgttagagcacatgaattaaagttggatgtgattagatatcatgattttcttggtcaagtcattaatcaatatacatcggtagcagttacaggtgctcatggtaaaacgtctacaactggtttattatctcacgttatgaatggagacaagaaaacatcattcttaattggtgatggtacaggaatgggtttaccaggtagtgattattttgcatttgaagcgtgtgaatatagacgtcactttttaagctatcacccagattatgcaattatgacaaatattgattatgaccatcctgattattttaaaaatatcgacgatgttgctagtgctttccaagaaatggcaaataatgtaaaaaaagctattattgcttggggagatgatgaacatttaagaaatttaaaagcagatgtacctatttattattatggtcttagtaaaaacgatgatgtatatgcagataatatacaaataactgaaaatggtactcagtttgatgtgtatattaatggagaatactatgatcaatttttaacaccacaatatggtaatcataatgttcaaaatgccttagcagtcattacaattagttatcttgaaaaaatggatgttaataatattaaagaagctttagaaacatttggtggtgtaaaacgtcgctttaatgaaacttttgtttcaaaacaagtattagtagacgattatgctcaccatccaagagaaattagtgctacaattgaaacagcacgaaaaaaatatccaaataaagatgtcgttgcagtattccaacctcatacgttttcaagaactcaagctttcttagatgaatttgctgatgcattaagtaaagcagaccacgtatttttatgtgaaatttttggttcaatacgtgaaaatactggagaattaactatccaagatttaataaatcgtattgacggatctgcgttaatcgatgaaaatagtattgatgtattagaaaaatttgataatgctgttattctatttatgggcgccggagatattcaaaaaattcaacgtgcttatgaagaaaaaaatggtatgtcaaaagaattctaatatgtttatatataattattatgggtatttataattaatgacttttattttaaaagaatatttaggaggcgttttttatgcattggattttaccaattgctggaattattgctgcaatcgcattcttaattttatgtattggaattgtcgtagttttaatttcagttaagaaaaatttagatcatgtggctaaaacacttgatggtgttgaaggtcaagttcaaggtattactcgtgaaactactgatttacttcataaagctaatcgcttaactgaagacattcaaggtaaagttgaacgtttaaactctgttgttgatggtgttaaaggtattggcgactcagttcaaactttaaatagctcagttgatcgtgtaactaactcaatcacacataatatttctcaaaatgaagataaaatttctcaagtagttcaatggtcaaatgttgcaatggaaattgctgacaaatggcaaaatagacactatcgtagaggaagtgcaaactacagagctaactctgtagctaatgatgcaaatcaaaattacactacaaacgttgagaaaaacttttaatatgattcaatcaaatgcacttaaatgaggtttttacttgtttaagtgcatttcttataggaggaataaatatgagtaagaaatataatcgtgactcatttgagacgaacaacactggtaatgatttacatggtagaggtgcgaatcaacaagaggacgtagcgcaaagtaatgcaacaaaacactacgatagagatgcatttgaaacgaacaacactagcaatgatttatatggtagaggtgcgaatcaacaagaagacgtagcgcaaagtagtgcgacaaaacactacgatagagatacatttgaaacaaataactcaggtaatgacttacatggtcgtggcgtaaatcaacctaatggtgatgtgtacacaaatgcgacaaaacattacgatagagatgcatttgagacaaataactcaggtaatgacttacacggtcatggtgtaaatcaactagatcaaaacaactttgttaatacaccacattataatcgtgatgactatgagagttataatcatccaaaattctcaaatcaagctgctagtgatactaatcaagagattgattataaaacttattataacgatccgagatttaagtctcgtaaacattttattgttagctttattactggtgcaatcattggctcaactattggacttttaactaaaaataaagcaaaccaaaaaattgaggatttaaaagcaaaagaacaagaagttaaagataattattatagtattaaacaacaaacagaagaaacaattgataatgtaagacataaaattgaagacttaaaaaatagaaaaaatacaagtatttcttccgatgagcttgcagcacaacgtcgagcaattcaatcagaaacatcaagtaatttagcagacgaatcaccacaagcgcaagaaatacaagaagccaaaaaagaagcaattgctaaagatgaaaaacaagaagaaacagatgcacttacagcacaacgtcgagcaattcaatcagaaacatcaagtaatttagcagacgaatcaccacaagcgcaagaaatacaagaagccaaaaaagaagcaatcgctaaagatgaaaaacaagaagaagcagatgcacttgcagcacaacgtcgtgcagttcaaaatgaatcagaaataaatcaattatctaatccagcaagaagtcatcaaactcaaaacagcgaaaatgaatcacaagcttctaaaattgcatcggcagctagaactaagcaagctaagttaaaagataataaagatgtagcaagtaatactcaaaaattatttgaggaggcaccaataacatcttctaaatatgataaagtgcctaatttgataactaaaaatcataagtcatttaataaagatgaagaaataacaaaaaataaacaaactcaccatgatgctaaatttgaaaaaggagttattactcaccaacatcaaccatctcaatcaaattcaaatcaaaaaaataaaaaacataatcaaaaacgtaaaaatcagaatcaaaaaaatcaaaataaaaacaaaacgccaaagcaacaacaaagagctgaaaaagcaaatagtaaaatagaaaaacgtacatttaatgattaatatttttaaaagagcagtgtaatattttacattgctcttttaattctttatatagtattattaattatattatttttaataattcagaaatattagaaaatttattcgatttatagttgaacatttttaatgtaattgttagaatactatctaaatacaattattttaccgctttaaagtaatataattcagtatagtaaaatttattgaggtgagtatgaatgtctacaaagttagaacaatacagggaagagataatttcaattaataatcaaattctagacttattatcaaaaagaggggaattagctcaaaaaataggagaagaaaaaattaagcaaggtactaaagtttatgaccctcaacgagaaaaagaaatgattaatgaattaatggatcgtaataacggaccatttaatgataatgtaattaaacaattgtttaaagaaatctttaaagcgtctactgatttacaaaaatcagaaaatgaaaaacacttatatgtttcaagaaaattaaaaccggaagatacaattgtaaaatttgataacggtggagttattggtgatggaaataaatcatttgtatttggtccatgctctgttgaatctcaagaacaagttgatgcagtagctcgtgatttacaagccaaaggtgagaaattcattagaggcggtgcatttaaaccaagaacatcaccatacgatttccaaggattaggaattgaagggcttaaaatattgaaaaatgttaaagataagttcaatcttaatgttgttagtgaaattgtaaatccagctgatttcgaaattgctgatgaatacttagatgtcttccaaattggtgcaagaaatatgcaaaattttgaattacttaaagaagctggacgtacaaataagccaatcttattaaaacgtggtttatcagctactattgaggaatttacatttgcagctgaatacattgcttctcaaggtaataaaaatattattctatgtgaacgtggtattcgtacttatgaaaaagctactcgtaatacacttgatatttctgccgtacctatcttaaaacaaggtactcacttaccagtaatggtagatgttacacatagtacaggacgtaaggatattatgttaccgactgcaaaagcagcacttgcagtgggtgcagacggagtaatggcagaagtacatccaaatccatcagtagctttaagtgatagtggtcaacaaatggatttaaatgagtttgataaattttataatgaattaaagccattagctgacatgtacaactctaaacaacttaaataaaacatcatcctttaatttactagctattcattttactaaaatttagggcaatatagaaagttttatatttaacttctatattgttcttttttagttaaaacgaatagttttattttgattttattaaatctattaactaaaatttgacacaattgtgaatataagtcttatatatttgacacattaccaatttatgataaactttgaaaatgaaatgaaaacacgtaataataataaatgaaacgcttacaaggaggaaattatgacggtaactatatatgatgtagctagagaagctcgcgtatctatggcaactgtatcacgagtagttaatggcaatcaaaatgtaaaaccagaaacacgtaaaaaagtaaatgatgttattcaaagattaaattatagaccaaatgctgttgcaagaggactagctagtaaacgtacaactacagtaggcgttattatacccgatatctctaatatttattattctcaacttgctagaggtattgaagatattgcaacaatgtataagtaccactctatcatttctaattcagacaatgattcagaaaaagaaaaagaaatttttaataatttgttaagtaaacaagtagatggcattatctttttaggtggtacaatttctgatgaaatcaaagatttaattaatcatacttcagttccagtagtagtatctggaacaaatggtaaagatgacaatatcgcatctgttaatatcgattttgctaaagctgccagagaagttacagaacaacttattaaaacaggcgcaaaagattttgtacttgtaagtggagattattctaaaaaggctcaagaagatgtactaagtggtttaaaggatgctttaaacaaacatcaattaaagttaaataacactatagaattatcaggttcagaaagctataaagacggagtgaatgtctttgaaaaattaaaaaataatttgcctgatgctatattatctattagtgatgaacaagcaattggtattttgcatagtgctcttgatgctggaataaaagttccagaagaactacaaatcgttagttttaataatacgcgtttggtagaaatggttagacctaaactatctagtgtcattcaaccattatatgacatcggggcagtaggtatgcgtcttcttactaaatttatgaatgaagaagacattgcagaacctaatgtagttttaccacatagaattgaatatcgaaacactactaattaaagtaatgtgaaaaaaaggataaaatcaaaattttatccttttttaatatataagttactataataaaattatgtaaacctttttaatattgctaaattaattataaataaaattaaatttttgtaaacgctatcaagtattcgacatatatttatttgttagttattataaagtagtaagatggtttggtagttatttctaaatatcttattacataaaatttattttaaacaaggggttgaaataatttggcacatttatcagatttagatattgctaatcaatcagaattaaaatcaattggagacattgcgaaaaaagcaggaatacctgaacatgctttagagcaatatggacactacaaagctaaaattgatattaatcaaattcaatcaagagatgaaaaaggtaaagttgtcttagtaactgcaatgagtcctacaccagctggtgaaggtaaatcaactgtcacagtaggcttagctgatgcttttaatgagttaaataaaaatgttatggttgctttgcgtgaacctgctttagggccaactttcggaattaaaggtggcgctactggtgggggatatgcgcaggttttacctatggaagatattaatttacactttaacggtgatttccatgcaattacaacagcgaataatgcattatcagcatttatagacaatcacattcaccaaggtaatgatttagcaattgatgtacgtcgtgttgaatggaaacgtgtacttgatatgaatgatcgtgcattacgtaatgtcatcgttgggttaggtggaccaactaacggtgttccacgtgaagatggtttcaatatcactgtagcatctgaaataatggcgattttatgtttagctcgtaatattaatgatttaaaagaaaaaatcagtcgtattacagttggttatactcgtgaacgtaaaccaattactgttgcagacttaaaagttgaaggcgctcttgcaatgatacttaaagatgcaattaaacctaatttagtacaaactattgaaggaacaccagcacttgtacatggtgggccatttgctaatattgctcatggttgtaactcgattttagcaactgaaactgcacgtgatttggcagatattgttgttacagaagcaggctttggttcagatttaggcgctgaaaaatttatagacatcaaagcacgtgaagcaggctttgaaccttctgcagttgtcctagtagctactgttcgtgcgttaaaaatgcatggaggtgttgctaaagataatctaaaagaagaaaatgtcgaagcagttaaatctggtattgttaatttagagcgtcatgttaataatattagaaaatttggagtagaacctgtggttgctttaaatgcatttgtacatgatactgaagatgaaactgaagcagttaaagcttgggctaaagaaaataatgtacgaattgccttaacagaagtatgggagaaaggtggtaaaggtggcgttgatcttgctaatcaagttcttgaagtcatcgatcaaccacaagaatttaaattcttgtatgatttagatcaatcattagaagaaaaaattgaaacaattgtaaaagaaatctatggtggttcttcagtaacgttcagtaaaaaagcaaaaagacaattaaaagaatttaccgacaatggatggggcaaatatccaatctgtatggctaaaacacagtactcatttagtgatgatgcaaccgctttaggcgcaccaactgattttgatataactatcagagaattagaagctaaaacaggcgctggatttattgttgcattaacaggtgcaattatgacaatgccgggattacctaaaaaaccagcggcattaaacatggatgtcactgatgaaggtcatgcagtaggattattctaatttagattaaagaaaaaacgtttgagacttttactgtctcagacgtttctttgttttaccaacaaatttcatcattttgttggtaaaactgcatgtgaaaagacaagtaatttagcggcaaaaccaattaaaagacgaatttcaggtaatttaaatgatatatcgatattttgtgttattactatcatacatttattttaaaagtcttttaaattcaatactcataaactatttaaattaatataaagtgcgataaaagatattgattgattcattgaggcttagttaataaatgatcataaatagtatattgttttgcctgttgatatgtctttttagtaattaccccttccactagcattcgttttaatacataatgctgacggtcaatactaattttaacttcgttataagccttcaaatcaccattattttcatacggtgtatacgtataaggactttgcaataagccaacaagataagcggattgtgcaacatttaacttggaggggggaacgttaaataaactataggaagcagatgcaattccagttatatttgcaccattataatcgcgtccaaacggtacaatatttaaatatgtataaataatttcatttttagataatattttttcaagacgcatcgctaatataatttcatttgccttacgactatatgttttttcatttgttaagacttgattctttattaattgttgtgtaattgtacttccgccagaacgagaatttaaacttaaaacatcttgtatcattgctcttattaacgcttttggtaaaattccatcatgtttaaaaaataatgtgtcttcagaagatattaatgctttaattacgtttgaatttacatgttttggacctacgatgagagagttttgagaatgatcatactcagttaaaatatttttatcgtgattcaaaatctcatcacctgaaaagtgtagtacgcggtgtttcaattcagtatcacttatatttgaagcttcttgagtaagatgatgaaaataagtagcagtaccaagaacaataagtatagaacctaaaactataatactcaaaaggcctaccataatatgttttataaatttataatttttttcaaacgttttaaattgaatatctttaaataataatttcatggtagtcctcctcaaattaaatacagtatatcatatctagcatatttgacttttagaagaggtttttttataattattatcaattcaatatgtattgaataagaggagaagtaatatataaattaacttaacagagagttagtggatgctgtgaactaacatgtgtttatatatgaatacacctcatacttatttattcaacgtttattaatgagcgtatcattaatagagtaaacaattctatttgaattgttaagtatggtggtaacgtgcataagcgcccttacattgttgtgagggtgcttttttatttaataaaaataaattttataggaggatataactatgtcaaatgcattactagaagaattacaatggagaggtttaatttatcaacaaactgatgaacaaggtattgaagatttattaaataaagaacaagtaacgttgtattgtggtgcagatccaactgctgatagtttacatattggtcatcttttaccatttatgacattacgtcgattccaagaacatggtcatcgtccaatagtacttattggtggaggcactggtatgattggagacccatctggtaaatctgaagaacgtgtattacaaactgaagatcaagtagcaaaaaatgttgaaggcttaagcgctcaaatgcataaactatttgaatttggcacagataaaggagccgtactcgttaataatagagactggttaagtcaaatttcactaataagtttcctacgtgattatggtaaacatgtaggtgtcaattatatgctaggtaaagattcaattcaatcacgattagaaaatggaatttcatatacagaatttacctatactattttacaagcaattgactttggccacttaaatcgtgaacttaattgtaaaattcaagttggtggttctgatcaatggggtaatattacaagtggtattgagttaatgcgacgtatgtatggtcaaacagaagcttatggtttaactattccattagtgacaaagtctgatggtaaaaagtttgggaaatcagaatctggagctgtttggttagatgctgaaaaaacaacaccgtatgaattttatcaattctggattaatcaatcggatgaagatgttattaaatttttaaaatactttacattcttaagtaaagaagatattaatcgccttgaacaatctagagatgaagcaccacatttacgagaagctcaaaaagcacttgctgaaaatgtaacagaatttattcatggtaaagaagcacttgatgatgcaattagaatttcagaagcattatttaaaggtgatttaaaatctttatcaattaaagatatcaaagcagggtttaaagaagtacctcaagttgaagtttctaaagcaacaactaacattattgatgttttaattgaatctggaattgcttcctcaaaacgacaagcaagagaagatgtaaacaatggagcaatttatattaatggtgaaagagaacagtctgttgattacaacttaactgatgaagataaatttgataatgaatttacaattattcgccgtggtaagaaaaaatacttcatggtaaattataaataatcttatctgagaagaatatattgaaaacgaggttaatccattattttggattaacctcgttatttattatcgaataaattgactattattatcttcagaattatatgattgcgaagatattgatttttgatttttaagagtgactgatacgtctttagttttaccatcacgtataacagtcaacttcacggtttcacctggctttttattttgatataagtacgttcttagatcggtatcatcatctacttttttactatctactttagtaatgatatcgccaacttttaattcactagagtggctaacttttgcaatatacacaccagtatcacgatcagtttttaattcttttttataagaatctggaatatcacttaagttaagtaaccctattccaattgaaggacgttctactttaccatgtttaacgagttgttcaattgtaactctaacttcattacttgggattgcaaaaccaataccttcaacttggtcagcagcaattttcattgaattaatacctactaaattaccattaacatctactaatgcaccaccagagttaccgggattaattgctgcatctgtttgtagcacatttactttagttccaccagaagtggtattagattcaattgtacgttcatttgcagaaataatacctgatgttactgagttagcaaattctaagccaagtgggttacccattgcgaaaacactatcgccagtttgaactttagaagaatttgcgaatttcattgctttaattcctttttgagaatcgatttttaaaactgcaatatctgaaactgcatctgtacctacaagctttgcttctacttgtttaccgttatgtaattgtactttaatttgtgatgcaccatcaataacgtgattattagtgacgatataagcagaattgttgttaatttgataaataacaccagaaccgataccggcttcttgtgccttagttgatttaccttgtaataaatcgtcaaaacttgttgccttttgcatattgatgacacctacaatagcaggagaaacatctttgatcatggcattaaccgatttatatttatcacttttaccgtctaacacattgccacctttatcattcgtagcctgttggacttgagatccaccactatttgaatcatctccattcataagtcgattaactcctaaaacaattaatgctcctatgataccagcgattagagcaataataataattctaaaccatggaaacttcggtttaggtggacgtgaatgctgataatcgctggattgaaaatattgattatattctgtcatattaaacctccgtatatattttaaccattatctcaattatgaagaaaatatttaaatatttctagtaaatagctatcagtcttaagatgtatcttttaaaatcttgttcacgtgataagttaatgataaaatcgactaagtgtagaaacttagaagtaggtgacaaaatgtataaatttattagtaaatttttagaattaataatcgtaaaaatggcacgttcattacatattgtaggtaaagagaacattcctaaagatagtaaatatgttgtgacttgtacccatgaaagttataatgaagtgattttattaggattagctttaattccaaatgaaattcattatatggctaaaaaagaattatttagtaataaatggggtggcaaatttttaagatctttaaatgcttttccagtagatcgagaaaatccgggacctagtacgttaaaacaacctgttaaattattgaaagatcataaaacagtaggtatcttcccaacaggtcatagaacttcagttgaaggcgcgcctttaaaacgtggagctgcaacgattgctatgctaggtaaagcaccaatcttaccagctgcttatgttggaccaacgaagttacatggtttagtcactggtcaagcgatgattaaatttggtaaacctatttatcaatctgacatacctaaagatttaaagcgtaacgaaaaaattgattttctaactaaagaaatagaaagacgtacagcacagttacaacatgaacttcatcttattcaagaacgtctttaatagatattgatagcattattcatcagaagattttctaaatagagaatcttctttttttataaataattgataaatggatgataggagtaccatgagtgaaaatgacaagttttaagaaatctattttccgttagtaccatatattacctaacgtatggttcttgttattttgtctttaatcatttttatttagttaatgcggaaagattatttaataaaaaaatagatttgaagtaaaataccagttaattatctcaatcaataataaaaatcatttataatatcttattaaatatatatacgttttaatctttattggttaaagcgtatcttttttattttgtcatcacattgtctatttatataaaataaacatatagcgtaaccgcttacaaatatggtagattatatattggactaaatacataaaaaatataatttttaataaataaaggaggataaaagatgtttaaattctttcaaaatctcggaagatcgttaatgctccctgtagcagttttaccagcaggagcaatcataactgggataggtaacttactaaatgcacttcatgttcttcccacagtagccatgttcttttcaattgtaggaacagctattttaggacaattaggattaatttttgctatcggtgtagctattggtatggctaaaaagaacgatggtgccgttgctttggcaggtgcgttaggatatgccatggtaacgaaagtattaaatccagaaaatgtggctacgttatttaatataaaagaaaaagcagttaacttaggctttacaaaaatggataattctaatgtatttcttggtattattatcgggttaattgctgcatattcttttaataaatttagtgaagttgaattacctatggccttgtcattttttagtggtaaacgattagtacctattatgactgtattttttagtactatattagcagttatactattatttatttggcctatggtcttttcaggcattgttgcatttggagaatggttagtaggttttggttcattcggagcatttttatatggtgtctttaatcgactacttattcctactggtttacatcatgcattgaatgcagtattttggttcgatacagcaggaattaatgatattggtaaattccaaacaggtgtagatgcagtaaaaggtataacaggacgttatcaagcaggtttcttcccaattatgatgtttggtataccagcagcagcacttgcaatgtatcacagtgctgagacaaagcaacaatagcaagtatggggatggtttttagcaagtgctatttcagcctttgtagtaggagttacagagccaattgaatttgcatttatgtttgttgcacctgtactttttatcatacatgccttattaacagggctttcattatttattgcatctctatttcagtggactgcgggattctcatttagtgcaggattaattgattatgttttatcactcattaatccagtcgctaatcaccctttaatgctattagttcaaggtattgtattctttattttatattatgttatttttagaattatgattaaagtattgaatttaaatacaatagaacgtggtgataacttactagctgatccaatagtagaagaaacgacaactatagataaatcaaaaagtggaaaatatcatcaaccagctacacaaatattagaaggtttaggtggaaaatctaatatcgatagtttaacaaactgtgctacacgacttcgtttagaactaaaagataatacgattattgatgaacaaaaaattagaaatgctggagctgttggggtgacgaaaaatggccaccattcaacacaagtaattattggtacacatgttcaacaagtagcagatgaaattgaaaaacagatgaaataattcaacagaaacaataaaagcgacattatatgtccaaatcatttgttacactatagtcctattgataaatattatttatataaaagagctaatgctagattttaagcattggctcttatttttattacattgactttatataaatgttcgttatgattataagtatcagaatagtcaaaaaatggagagatgtcgatgaaatcaattttatttgatgtagatggtgtgtttttaagtgaagaacgttgctttgatgtatctgccttaacagttgaagaactattaaagagtgatgattttttaggtttagatagcgctcaaaattttaatcatatgaatgatgaattaattgaagatataagaacacaagtatttttaaacgatcaaattttaaatcaattaaaatctttaggccttaattctaactgggatatgttatttgttgtatttagtattcatttcatccatctcttgaaacagttggattcagaaacaattagacaagtgactcatgttgaaacgttttcagttgagactctacgtgaattacaatcttataattatcaatttaaagttaattatgcagtaccgttaaaatttattcaaaatagtcaaagtggtaaagagaatatttatcttgaattagaagattacgcaaaagatcaattaaatattgaaaatgctaaattatttaatttaaaaagtccactttggaatttagctagagcagtatatcaagaatggtatttaggaacaactttatatgaaaaagtagaaaagcttactcctttgtctattcctaagtctggttttatttatgaagaaaagatcttacgtcctgtggaagaaattaaaacattattaaatgatataaaacaagcaggttttaacattgccattgcaactggtagaccaagaacagaaacaattgttccatttgagtcctttggtcttaaatctttttttaatgaaaatcatattgtcacagcgagtgaagtattgaaagctgagtcagtatttccaaaagaagggccactaggtaaacctaatccatttagttatattgcaactctttatggaaacaatgagggagattatttgcactatattcaaaatcaaaaacatattgttaatgagaatgatgtatttattgttggtgattcattagcggatttattatgtgctaaaaagattggggcaacatttataggtactttaactggtttaagtgggaaagaagcaaaagaagacctagagcaacacggtgctgactatattgttaatcatatttgtgacattagacatattctacttaataaataataaaaagaaaggaacgccgaatattatcgtcgttcctttcttatttattatattgataaagttgtaccgtagatgttatcaaaatcaccaatctcatataattctttaataacttgttgagtaataggttgatctattgacagaatcatcattgcttgtccaccttcagaacttcttcctaaagacattgaagcaatattgatatcatgtttaccgagtagttgacctgttaaacctaccattcctggtaagtctttatgataagaaataaattgataagtattgggtttaaaatctactgaataatcattaattcttacaatacgtgcaccaaatccatctattacagttgcaccaatttttacttcttcatgttcacttatcaaattaatttgaatataattgctgaatgttccttgtgaagcacgattttcaatatgatgagtgataccttgttcgtttaataatgcaatagcattaattaagttcacgcgttcacctaaattttgttttaaaattgacgtgacgattgatcgagtaattaaatcagattcttttttagcattttctccgttaaaagtcactttaatctctctaggtgcatcatctaataattgaattgccaattcacctgaaagctggctaatacgaagccattgttgtgtcttctcatcaatatggtttaagtttaacttaggtgcattgactgcatttgtaacattaccattttctaaaatatcaatgatttcttcagcaacggatacagctactttttcttgtgcttcaatcgtagatgcacctaaatgaggagttacaataatatttttatgatcgagaagcggtgaatctaggggaggttcattttcaaatacgtctaatgctgctctagcaatttgatgttgatttaaagcattaagcaagtcgttttcattaataattccgcctctagctacattaataatttgtaacgttggtttggcttgattaaaaaaatgagcatcgataattccttttgttttaggtgttaacggtgtgtgaacggtaacaaaatctgaacgttgagcaatttcatcaatcgttgctagttcaattccaagttgctcggctttttctttagtcaaaaaaggatcataagctaaaacagtcataccaaaactttttaatctttctgctacacctaaaccaatacgtcctgctccaatgacgcctaatactttttgatataattcaactcctttaaatgctttacgattccattctttattctttagtgatgtgtaagcttgcggaatatttcgtgccattgctagaatcatagcaactgagtgctcagtagcagaaatcgtatttccatcgggagcatttacaacgagtataccgtttagagttgctgattttatatcaatattatccacacctacaccggctctagcgataacttttaagtttgaagcatggttaataatagattctgtgacttgagtttgactacgtacgattaacccttgatagttaggaataatatcgacaagttcttcttcagttaaaccagacttaaaatcaaccttaaaatcaggatgatggattaaactttgtaaaccttcttctgaaattggatctgaaactaaaatattatgcgtcatgttgaattacctccgtaaattttaacgtagctttaccaatataattgactttacgataatctgtaagaattatctctaaagctgaaacaacagataaaatatcaaaaggtgacacttttcccatgtgaccaattctcaaaatggttccttttagtttgccttgaccaccagcaatagtaatattaaatcttgattttagtgttgatttaatatatgttaattcgtctttatcgtgagggataaaagaagtaacagtaggagaggcatatgagtctttagtaactaataattttaaatctaatgcttttaaactttctcttaaaccacctctaatcaaataatgtctgtgaatggtattgttaaatccttcttttttaataagtgcagcataagcgttaaccgctctaaataatccaacatttggtgtgaatggagtagaattttgttcaatagaatcaaagtacttatttaaatttaaataaaaacgtggtgttttaactgctttaaatcgctcttgtgcacgatgattataagcaacaaaagatagaccaggcggtaacattaaagctttctggctacctgacacgagtacatcaatattgtctctttctaaatcgacatcaacggcaccaatacaacttacgccatcgacaacgaagtaaatgtcttgattgaatgctttaattacttttcctaattcgtgtatagggtgaagtacagcagtagaagtttcgcaaaattgagtgaatacagcagtaatatcataattaagtgaatgtaaatatgtttcaaatgcttcaatgtcgacagcttttccccattcaacatcataaacatgtacattcttataatatgtttccgcgatttgtttaaaacgattaccaaatgcacctgatacaatgactacaaaatggtcctcaggattgactatatttaacatactagcttctaaaacactagtaccgcttgaagtaaggatcattactttgtttttagttccaaacataggttttaaatgattaaatgcttcttctgcgacagcttcaaaatctgaagaacgatgacctatcattgataaattaagtgcatgtgtgatttcatcaggtacaggggttggtccaggtgttaataataaaggttcgtaataatacatcgtaaatcttcctcctgatataagattttttaattttaccaaatattctgaaattttaaaagtctaaaataaaaagcggcagtttaattgcccgcttttagttctcatcttgaatggttgcttgaatttctattttaacgttgtttcgaattgagttagatatcatacaatgatgatcagcaatatctaatagtttaggaagtcgtttattaagacgcgttttttcttcttctgtaagagatattgttggataatgagtgattttttccattttaaattttccattttcaaaaactgcactcccaattgacttaatttctaaatgaatattagtaaatttagctcgttcaagtgtagcagctaaagagataatataacatgaggaggctgctgcaactaacatttcatcgggatttgtcccagttccattacccccaagtgaagagggaatagaaatttgctcagaaattacatcgcctttaactttaccgatttcttcacgacccccatgccatgacgtatgaactacaaaatcgtgtttaaccattattattgacctcctatatcattatggtaatttaagtgtagttgaacatataactaatttaaaggatggtgtttaaaaatgaaaatacaaaagcctaatacatcatttcaaatcgttgcacatcgtggattatcgcagaaatatcctgaaaatacgttggaaggttttaaagcagcccttatgcaacatattgatatgttagaaattgatgtacattttacaaaagataaacaattagtagtcattcatgacgactccattgatcgcacatcgaatcaaaagggtaaagtaaaagattttactttagaagaattaaaacaatttgattttggaatcaaacatggtgaatcttttaaaaatacctgtatttctacttttagcgaagtactttctttatttaaaaaatattctaaaacattacttattgaaataaaaaaaccagaacagtatcctggcattgaaaaagcgttacttgaggaactagataaatttcaaattccctctcatagagtcgttattcagtcatttgatgtggaaagtgttaaaaaaatgtctgaatacacaaagaaatatgcactaggtgttttaataagtaaaaagcaatactggtacaaacaacctgattatgaaaatatagcttcttttgcacaatttataaatcctaattataaattaataaataaaaaatttatcaagcgtgctcatgaacatcatcttaaagtaataccttatacagtaaataacgtgaaagatgtgaagaaattgattcatttaggagtagatgggattatttcagatataccagatgatatatttaaactataaataaaaaaccaccctgaccaaaatggaaagggtggtaaaatattaatcaacttatcttgagtagtactcaacgattaattgttcattaatttcagctggtaattcactacgttctggtaagcgaacgaaagtaccttttaagctgtcagcatcgaaatctaaatattctggtacgaaattgttgatttcaacagattctttaatgatatctaagttttgtgatttttcacgaactgagataacttgaccaggttttaaagcgtatgatgggatgtcaacacgtttaccatcaacttcaatatgaccatgaccaactaattgacgagcttgacgacgtgtacgtgctaaacctaatgagtaaactactgcatctaaacggctagctaataaaatcatgaagttttcaccatgtacaccgtgctgtttaccagcaatatcaaatgtattacggaattgtctttcagtcattccatataaataacgtaatttttgtttttcacgtaattgtaaaccatattctgataattttttacgttggtttggaccatgttgtcctggtgcgtaaggacgtttttctaattctttaccagtaccacttaatgagatacctaaacgacgagattttttccagttagaacctctgaatcgagccataataagactcctcctttttcttttttgttggaatgaataaacaaaaaagagtgttgtatgctcattaagatatattgttttatgtgtcttcaccttatagctacagttacatgacacgtccacatcgggaacaacatagagcttaataatatacaactgctattttcgttaattcacacaaaatccattgtaccattattttttaaagtgtcaaggaatcatttgaatttattattttgataattggtgttctaagatagaaacgatttcttcaagtccttgttgatcgtctttactaaatcgttgtgtaataggcgcatctacatctaacacgccgatgatttcattattaacatgaattggaacgacaatttcagatttactattagcatcgcaagcgatgtgaccaggaaatgtatttacatcatctacaagttgtgtttggttatttgcaacagcagttccacatacaccttttcctatagagatatgtatacaagcaggatggccttggaaaggacctaaaataagttcattattttcaattaaataaaatcctaaccaattgatttgatctaaattgtcattgagtaaagctgaagtattacttaaaattgcgattagatttgtttcatcttcaataagacttgcaagttgtttacctaataagttgtaatttgtttctttaattgtcggcatataaaaacctctctatcaatattttgattattagtataaatgtaaaaaatttttcaatcaattctttgaattttattttaatgacgagataagatacgttataataatgataatataggaggagaatgagatggttttatacattatattagcaattattattattatattgattgctgtcggtattatgttttatttacgttctaacaaacgtaaaatagttgagcaagcagaagaacgtaaattaaaagttcaacagttaccttttgaagataatttagaaaagttatcagctttaaatcttaaaggtgaaacgagaacaaaatatgacgcgttaaaacaaaacacattagatcacactaataactatttagcaccagtagaagaaaaaattcatgacgctgagcttcaacttgataaattccaatttgcaggagctcaaactgaaattgatgatgctcatgaattaatggatagatatgaagctggttatcagtcacaagtagatgaagtaaatgaaattctttctctacataaagataacgaagcaatctatgaaaaatgtaaaacagattatcgtgaaatgaaaagagatgttttagcaaatagacatcaatttggagaagcggcagctcctcttgaaaaacgtattgaggcttttgaaccagaacttgatcagtatgacatgctgaaagaagaaggtaactatgtacaagctcataatcatattaatggattaaatgaatctattaatgaaacaaaagaatacatggatgaaattccagatttaattagagaaactcaaaaagagttacccggacaattccaagatttaaaatatggttgtagagatttaaaagtaaatggttatgacttggatcatgtaaaaattgatggtacattacaaagcttaaaaactgaattaaattttgtagaacctatgattagtcgtcttgaattacaggaagctaatgataaattgcaacaaattaatgataagcttgatgaaatgtatgatttaattgagcatgaagtaaaagctaaaaatgaagttgaagaaacaaaagaagatattacaaatgaattattcaaagcgagagaaatgaattatacgcttagaacagaaatcgactatattcgagaaaactatttcattaatgaaagtgatgttcatagtattagacaacatgaaaatgaaattcaaaatctagttgtagtatatgatgatattctaaaagaaatgtctaaatctgctgtgagatatagtgaagtaaaagataatttagaatacttagatgaacatgtaaaagtgattaatgaagaacaagaaaaattacaaaatcatctgattcaacttagagaagatgaagctgaggctgaagataatctattaaaaattcaatcgaaaaaagaagagatttatcgtcgacttcttgcttcaaacttaacaagtgttccagagcgatttgttattatgaaaaatgaaatcgaccatgaagtaagagcggtcagcgaacaatttaacgaacgtccgcttcatgttaaacaacttaaagataaagtttcaaaaatcgtaattcaaatgaatacttttgaagatgaagcgaatgatatattagtcaatgcagtctatgcagaacgattaattcaatatggaaatagatatcgtaaagatcatcatactgtagataaaagcttaaacgaagcagaacgtttatttaaaaataaccgttataaacgctcaattgaagtatcagagcaagcacttgaaagtgtagaacctggtataacaaaacatattgaaaatgaagtaattaaaggataataaatttttatagttagagaatgacctagacatccacatatttctaggttattctcttttattttaaaaaaaaaatagtataatgcttgagtgtctatttttaagtcgagaaagttaaaatatgttttagatatgttattgatgaaagtgagtgttctatatatatgatttatttagacaatgctgccacaacaaaaccgaaccaagcggttttagattcatttctaaaagtaagtgagaaagcttattataatgctaatagtcctcatcaaatgggtttacaatcagaaaaaatattattacaggctaagtcgcgtgtaaaagagatgttaaacctcaataaaaatactgatatcattttcacaagtggtgctactgagtctaataatattgcactcaaaggtattgcattaagaaaaaaacaatttgcgaatgtaatcattacctcagtcttagaacatccatcagtattagaagtgatgcgttatttagaaacacaaggatttatattgaaatatgtgaatgtgactccaaatggtcaaatagatattaatcatttagaacaattaatgacggataatgtgggcttagttacatgtatgtatgtcaataatgttatgggacaaatacaaccgataaaagaaataggatcattattaaaacaatatcctaaggcacattttcacgtagatggcgtacaggctttagggaaaattccaatgcaattagaggatgtaaatagtattagttttagtggtcataaatttaatggtttaaaaggtcaaggcatattaattatcgataataaggaaaaaattgaacccacaatatttggcggtggccaagaatatggaattagaagtggcactgtaaatttagcaatgaatgtttcacttgtgaaagcaatggaaattgcaattcaaaatttagatgagcttaatcatcgtctatcacgctataataaagtaattagagaatgtttaagtcaatataagggagtgtatattaattctccagaaaatagtgctccgcatattttaaatatcgcttttccaggagtaaaaggagaagtgcttgttaatgcattctcgaaattggatattatggtatcgactacaagtgcatgttcgtctaaaagagaaaaattaaatgaagttttgttagcaatgggtattaaggataacagaatagagggaagtgttcgcttatccatgggtgaaacgacaacagaaaaagatatcgaacaatttaaagataaacttgaattaatctatgctcaaataaaggagttgttgaaataaatgaaatatgatcatattttggttagatatggagaacttacgttaaaaggaacaaatagaagaagattcacaaatgtattaaaagaaaatgttattcaatcattacgttcattagaaggtacacaggttaaatgtgagagagatcgcatgtttatctcgctttttgaggacgtaaatgttaatgaagtcataaatcgtttaacaaagatatttggcataaaatctattagtccagtatttaaaacaacacaaaatcttgaagatatgaaacaactttgtatttcgttagctaaagactttgcaaatggagatacttttaaagttgatgtaaaacgtgtagataaatcattttcattagatacgtatcaactacaaagagaactaggtggcgccattttaaaagcagttgatcatttaaaagtagatgttaaacgtccgacacataatattaaagtagaagtacgtaaaaaaggcgtgtatatctatactaaagttatcaatggtgctggcggattacctaccggtacaggtggtaaaacacttcttcagttgtcaggtggaattgattcaccagtagctggtatggaaattatgaaacgtggagtaaaaatagaagctattcattttcacagtccaccatttacaagtgaaaaagcgaaagacaaagtgattgaattgacacgcatactatctgaacgtgtaggaccaattaaattacacattattcctttcacagcacttcaaaaacaaatcaataagtctgtgcatccacgatataccatgacttctactagacgcatgatgttacgagtgacagatattatcttagaacgtattggagcgaatgctatcgtaaatggtgaaaatttaggtcaagtagctagtcaaacattaaagagtatgtacgcaatcaatgatgttacatctactcctattttaagaccacttatttctttagataaagaagatattattaaaaaagcaaaagaaataggaacatttgaagtttcaatacaaccttatgaggattgctgtacgattttcacgcctgaaaaccctgtaactgaaccagattttgataaagttgttaaatatgaaagtgtgtttaattttgatgatcttgtccaagaagcagcagacaatgtagaaacaatagagattaataaagattataaaactgaaaaagataaacatactgatgcgctcattgatgaattattttaatatgaaagtagtaaagtcatttaataagaggtgggcgttattgaactaagttttcatattattttcattattattagttttggtttcttggcagcatttatagatgctgttgtgggtggcggtggcttaatatcaattcctgcactcttagctataggaatgccgccatcattagcattaggtacaaataaattagcgagtgcgtttggctcattaacgagtgcaatcaaatttttaaaatctggaaatgtggataaaaaaatagcatttagactatttccgtttgtatttatatttgcagttggtggagcaagtttagcaactttcttaccatcagaagttttgaaaccactcgttatagtcatattgacatttgttttaatttacaccatttttaagaaagagtggggtaatgtcagaacgttttctaaatttactattactaaagcgattgcctttatatcactcctgcttttaattggattttatgacggatttttaggcggtggtactggatcatttatgttatttgtattattaatgtttggatttgattttttaagtgcagctggaaatgcaaaagtactaaactttgcttcaaacgttggtgcattaacattatttattattcttggccaagtaaatataacatatggattaattatggcagtcagtatggtgattgggtcgtatactggtgcacattttgcaatcaaaaaaggtgtaggatatgtcaaaattgtatttataatagtcaccattttactcattttaaaaaatacctttgattatattatgcaaatcatttcaaattaaaataatagttagcgttttaaatgattgaaataagtttaaatactatcgtatcattaaactataatttaaataactaatgggaggtcatataatatgacagaaattacttttaaaaataaccctatacatttagaaggaactgagatttcaaaaggagatgtggctcctaattttaaagttttggataatagtttaaatgaagttactttagataattttaaagggcaaaagaaattgattagtgtcgttccttctattgatactggtgtatgtgatcaacaaactcgcaaatttaatgaagaggcttctcaagaaaatggtgtagtacttacaatttcagcggatttacctttcgctcaaaaaagatggtgtgcatcaaatggtctagaaaatgtaattacgttaagtgaccataaagatttatcatttggtgaacattatggtgttgttatgaaagaaatgagattattagctcgttctgttttcgtattagatgaaaacaatcatgtagtttataaagagttagttcaagaaggtactgattttccaaatttcgaggctgctttagaagcatatcgtaatatttaagtcactactaaacgattaaattaaagatataatactaatattgtccatatgtattttaaaatgaatgatttcgttttaagacatttgcattatggacatttttttattggaaaggaattgaatatggcagaagaacaaactattatggaaagattattccgaactttagatgataaagctaagtcgttaaatgaagaaaatggtcaaagctttatagaaaatttaggcttagcaatggaagatgtatatcgtaatcaacgtacactgttagaacaagcaacgttccaagatcgtcgaaaagcatttcaatttgcttacttgagcttattacaagaagaaaatattcaagcaaatcatcaaattacaccagattctattggtttgattttaggttttttagtacaaaaatttacagaaaataataaagaattacagattgttgatattgcaagtggagcaggtcatttaagcgctacagtgaatgaagtattaaaagatagcgaagttatgcatcacttaattgaagtagatcctgttttatcgagagttagtgtgcatctagcgaattttttagaaataccattcgatgtgtatcctcaagatgcaattatgccattaccattggaagaagctgatgttgttattggagattttcctattggatattatcctttagatgggcgtagtaaagaaatgaaacttggatttgaagaaggtcatagttattcacactttttacttatcgaacaagctgtctatgctttaaaacaaagtggctatgcttttttagtagtacctagtaatatttttgaagatgaacatgtgaaacagctacaaaattttattactacagaaactgaaatgcaagcatttttaaaccttcctaaaacattgtttaaaaatgaaaatgcatgtaaatcaattttaatactacaaaagaaaaaagcaaatgaaactaagcctgtagaagtgttattagctaatattccagattttaaaaatcctaatcaattccatggttttattaacgaattaaatgaatggatggacgcaaatcattcacaaaaataaactgtgatattcttgaattacttctgtattagtggttaaatagatatggatatttaatatataaattggaggacaatgaatcatgtctaaattagttttagcgattaatgcgggaagttcttctttaaagttccaacttatcagaatgcctgaagaagaattagttacaaagggcttaattgagcgtattggtattaaagattcaatatttactattgaagtaaatggtgaaaaaataaaaagagttaaagatattaaagatcatgaagaagcaattaatatcatgttagatagcttcaaaaaacatggtattattaatgatattaatgatattgctggtacagggcatcgcgttgttcatggtggagaattattccctaaatctgctttagtcactgatgaagtagaagaaaaaattgagtcattaagtgaattagcgccattacataatcctgcaaacttaatgggagttcgtgcctttagaaagttattacctaatattccacatgttgtagtttttgatacttcattccatcaaactatgccagaaagttcttatttgtatagtttaccatataactattacgaagattttggtattcgtaaatatggtttccatggtacaagccataaatatgtatcacgacgtgcggctgatattttagaaaaacctattgaagaattacgtattatttcttgtcatattggtaatggtgcgtcaattgctgcaattgatggtgggaaatctatcgatacatcaatgggcttcactccattagcaggtgtaacaatgggtacacgctcaggagatattgatccagctttaattccatttattatggaaaaaacaggtaaaactgctgatgaagttttaacagttttaaacaaagaatctggattattaggtatctctggtacttcaagtgatttacgtgatttattaggtgaagctgcaaatggcgatgaacgagctgaacttgctttagatatttttgcttctagaattcacaaatatattggttcttatgctgctagaatgcatggcgttgatgttattgtcttcacagcaggtgtcggtgaaaattcatcaccaatacgtgctaaaattttagaaggcttagagtttatgggtgtttattgggatcctaagaaaaatgaatctactcacggtgaagaagctttcataaattatccacactctccagttaaagtaattgttgttccaactaatgaagaagtcatgattgcaagagacacagtaaaattcggtgaattataagatatattaaaaaaacgatgagattaaacttatctcatcgtttttttagaacatagcagggaaataggacaaaagtcatgttgaatttgttgtcctaccctgatgatgtatctctaacatattaaagagacctgagacaattccttatgtctcaggcctttttatttaaatacattactttattaagaaaattgttttctaaattcaggagttgcaacttcaggttggaaatcatctggaatttcttcagtacgcacgacaagtacgtcacacggtgcatgacgaacgattgcttctgaaacagaaccaacgataaatcgttctactgcatttaatcctgaagtaccacacattattaagtcgacacctaattcatttgctaattttttaggtataattgctttaggtgagccaaattctagacgagtttctacatttgtaacaccagcacgtgaagcaacttctttatagccttttaaaagttcatcagaaaaacctttagatttttctgtgaattgagcatcgtacacttcataagaagagtaagttcttgaatcgataatattaacaatagttaattgagcatcattacgtttagcaacgtctaaagctttgttgaaagcccattctgcttcatgtgaaccatcaactgcgattaaaatatttttataagttaacatcttaagtcccccttaacttttcttaattcaattttaacataaatttctgaatatttaatatttataattcaacaattatgtggacgttgtgcacctttgatgattgcgctttcattaatttagcgttactataaggagtggaggtgaatggaatgaaaatcggtattccaaaagaaataaaaaataatgagaacagagtaggtttatcaccaagtggtatacatgcattagttgaacaaggacatacagtacttgtagaaacaaacgcaggttctggttcatattttgaagacgaagattataaacaagctggtgcagaaatagttaacgatgcaaaaacaacttgggatgtagacatggtgattaaagtaaaagaaccattagaggaagaatataaatatttcagagaaggtcttatcttattcacatacttgcatcttgctaatgaggaaaaacttactcaagcattagttgataataaagtagtaagtattgcctacgaaacagttcaattaccagatcgttctttacctttattaacaccaatgagtgaagttgcaggacgtatgtcagctcaaattggtgcagaattcttacaaaaagttaacggtggaatgggtattctacttggtggcgtgccaggtgtaccaaaaggcaaagttaccattattggtggcggacaagcaggtacaaatgctgctaaaattgctttaggattaggtgcagatgtaactattttagatgtaaatcctaaacgtttagcggaattagaagatttgtttgacggtcgtgttaatacaataatgtctaacccacttaatattgaaaatgcagttaaagaaagtgacttagttattggtgcagtattaattcctggagcgaaagcaccaagtttagttactgaagatatgattaaacaaatgaaagacggttcagtagtagtcgacattgctattgaccaaggtggtatctttgaaactactgataaaatcacgacacatgatgatccaacttatgttaaacatggtgttgtacattatgcagtagcgaatatgcctggtgcagttccacgtacttctactattgctcttaataatgctactttaccttatgcacagttacttgctaataaaggttataaagaggcatttaaagcaaatgagcctctttcattaggtttaaatacgtataaaggttatgtaactaataaaggtgttgcagactcctttgatttaacttatacatctattgaagatgcattaaaagaataatctaaattaattcaataaaaagcggaataacattctttatgagtgtctattccgcttttttgatataaaagagagatttaacttttaaattacttattataatgtgtaagtacttcaaacccagtatcagtgactaaaatatcatcttcaattcggacgccagcgacattaggcacataaatgccaggttcaattgtaatcaccatacctgcttcaagtaaatttgtatttgtacttgatacatcttgatattcatgttcttctaagccgagtccatgtcccaatcgatgagggaagaaatcaccgtaacccgcttctgaaataatgtctctagcaattttatcaatattttgtaaagggatacctggtttaattgcttcaatagcactttgttcagcttttaatacaatatcataaattgttcttgcttctttacttggttcaccaaattttacagttcttgtcatgtcactacaataatgattatagactacacctaaatcaaatagtacatattcattcttaactaatgttcgatctccaggtgtaccatgtggagatgcagcatggtcaccaaatagtaccattgtatcgaaactcatttcactgacaccatattttttaatttcattttcaatatgatttacaacttctctttcagttacgccttcagataaaaatgaaacaccaatatctatacatttatctgcaagttcagctgctttttttatatttttaacttcattttcatctttaatatttcttagctttttaatagttaaatcgatatcttcatacgctttaacgttaaagttattcgtaagttctctttgacgtttaacagtgaggtgttcactttcaattaataaagtattaaatgtatggggtgctaaatcgaaaggactctcagtatctaaatagccaacaatatttccattaaaaggtgaatgcttaacttcttcaacttccattttaggacaatataatgtgcattcaccatttgaagttataagtaacgcaaacaatctttcatgaggttcacttctataacctgtaaagtagaatatattaagtggagtagtaatccatgctgcatcagcatttttttcttttaatgttgcaataatttcatctgttttaatcataatacgtatcttcctatagtttaatcaatttaattttacgtctaaatagaaatgaattcaaagtgtttcaagttataaatataattatcagggtataataatattaaaatataggaggttctatatatgaaactttcatttcatggacagtcaacgatttattttgaaagtaatggtaaaaaagtaattgttgatccatttatttctggtaatgataaaagtgatttagatgagcagacattagatgtggattatattattttaacgcatggacatggtgatcattttggtgatgtagttgaattagctaatcgtaatcatgctacagtgattggttctgcagaagtccaaggctatttaacaacgtatcatggaattgaacacgcacatggtatgaatattggaggtaaatacaaatttgatttcggtacagtaaaatttgttcaagccttccacagttcaagttatactaatgaagatggaatacctatttatttgggtatgccaatgggtgttatcattgaagcagaaggtaaaacgatttaccatgcaggagatactggtttatttagcgatatgaaattaattgctgaacgtcatccggtagatgtatgttttattcctattggtgataattttactatgggtattgaagatgcaagttatgcaataaatgaattcattaaacctaaaatttcagtgcctattcattacaatacattcccattaattgaacaagatccagagaaatttaaagaagcagtatctcaaggagaagtacaaattttacaacctggtgatgaagtgacattttaatgatatatagaaaagacggcaaatatagcatttaccgtctttttttataagattaaaattatttaactattaaaacagggatagtagcacgtttagcaactttatgactaacactacctaaaacaaatttcttttgttgttcagctttacggttacttaatacgacaatgtcatatttaccactatttgcatgtttcactaattcctcttttggatttccacgaacgataatttgatcataattaataccataatcatctaaagtatgacgtgtgtgttcaagaccttgatcacgacgatgtgtcaattgttcgatgtgagtacctcctttaatagaggcttggatgtcttgttcaccaatcgcattcatgattgtaacaacggtatctgggccagctaattttgaaatttctttcaatgctttgtcattttttaattgagtatctacacctagtaatatgtttttatacataggtcatccctccttatatttaattatataattagtgatttaatatttccatcaaatttatatttttattatttaaattaacttcatttatatacattaaaaacaaaatgataccgatatatcagtttttgatacttttgtcacattcaaatcgatttttataaataaaaaagttataatatattagacattgtctaaaaatgaagagggttgaaaatgactaaacatgaacaaattgtatcctatatagaatcattaaatataggacaaaaaatttcagttagaaaaatagccaaagtaatgaatgtttctgaagggactgcttatagagcaattaaagatgctagtcaacttggctttgtaactaccatcgatagagtaggtacggttcggatagataaaaagagtcgtgaacaaattgaacatcttacttttcaagaaattgtgaatattattgaaggtgacatcataagtggcaaaagtggtttaaataaaactgttagtaaatttgcaataggagctatggaactaaaagatgtagtaaagtatattggaaatcaaacgttattaattgtaggtaaccgtcctgaagttcagatggaagcattaaaaagaggaagcggtatacttattaccggtggatttagtacagctcaaaatattattgattatgcaaataaacaagaactacctattatttcttcaaattatgatacatttttagtagctaatatcattaatagagccatgtataatcaaatgataagaaaagaaatacttattgttgaagatatcgtaaaacctatcaatgatatgacggtagtgttcgatgaaatgggtttagacgactatatttctcgtgcaaaagtcacaggacattctcgttttccagtagtaaataaagattggaaacttgtgggaattgtaacgagtaaagaagttattcacatgaacgaagatgataggatgaataaagtcatgacaagacgacctatcaatgttgaattaacaactacagtagcgagttgtgctcatataatgatttgggaaggaattgaaattttacctgtcacaacaagaaataaaaaagcaataggtgttattacacgaaatgatgtgttaaaagcaatgcaattaattggaagacaatctcaaattggagaaaccattatcgatcaaattgccaaacacatctcaataaatcataatgagacgtctgttaaaatttcaccagttttaaccaaccaatatggtacgttgagtaaagcaatatgtgtcgcaattattgaagaaacaattaaacatgaattgcgtaagtataaaaaagtagatgttatgattgaaagcttgaatattatttatattaaaaatgtcgcaattgaaagtacgcttgatgtaaagtataacatgttagatgtaggaagaaattttgctaaattagaggtcactatgacttgcaaaaatgagaaagttgcaaatgcaatgattatatgtcaaatgtttgaagatatttaaaatagtttttgaaattaaaggagaaaagaaatggtagaaatttttaataaaataatgaatgaaattgataaatatgaaactgttattattcatagacacgttcgacctgatccagatgcatatggttcacagttaggcttaaaatattatttgcaacgtaaatttccagaaaagtctatttatgcagttggacaaccagaatcttctttagcatttataggggacttagacagagttagagatgatatatatcaaaacgctctagtgattgtttgtgacacagcaaatgcacctcgtattgatgatcagagatttaatcaaggcaaagatttaattaaaattgatcaccatcctgctactgatcaatatggcagaataaattatgtcgataccaatgcaagttcaaccagtgaaattatttttgattttattacacattttaatgatattaatattatcgatgaatctgtcgcacgtgttctatatttaggaattgtcggagacacaggtcgttttttatttagtaataccacaccacatactatgaatgttgctagtcgtttgctagaatttccatttaatcataatgatgtattaaatcaattgggtgagaaagatccaaaacttatgccatttcaaggatatattttgcaaaatttccaattaagtgaaaatcatcaatattgtcaaataaagattactaaagatgtcctaaacagatttcaaattgcacctaacgaagcatctcagtttgttaacactgtagcggatatcaaaggtctaaaaatatggatgtttggtgttgatgaaggtgatcaaattagatgtcgattacgttctaaaggaattactatcaatgatatagctaatcaatttggcggtggaggacatccaaatgcatctggagtctctgttgaaaattgggaacaatttgagattttaggtgaagccttgcgccaaaaactataaattacgaaaggaagtcatacatgtttgtacatttgaatattcattcaacatatgatttattatattcaagtttaaaaattaacgatgtcgtatcaaaggcaaaagcaaatggatatcaagcacttgcaattacggatacgaacgtattatatggcttccctaagttttatgacgcatgtgttaatgagggaattaagccaatatttggaatgactgtaatggtttctgatgaaattagcacaattgaaaccatattattcgcaaagaataatgaaggtctccatgctctgtatcaactttcttctgcaattaatatgaaacaaaagactacgatacccctaaaatggctacaaaaatatagttaccatcttgctattgtttttaaagatgctaatgcgtctcatcaatcgttaattcaaacactaaagaataatgagtcagtatttataaatcatacaagtcaattagatttttcagacgataaaattgtctttcttaataatgcaagatatttaaatcctgaagatgcagatacaatacttgcattaaaagcaataaaaaacaatacaaaattggatttagtaaatgatatcaaggatgctcatgaatattttccaactagtgaaaatattaaagaacttcagttgtctgaaaaaataatagctaatacaaaggctttagctgatgagtgtaacgcagaaattcaataccatcaaaatctattgcctaactttaaaacgcccaatcaacaaagtgctaaatcctatcttttagaaaagttaaaatataatcttaaagaatttaaattagataaagatcagcgatatattgaccgattacatcatgaatattcaataataacgaatatgggattcgaagattattttttgatagtgagcgacttaatacattttgctaaaacgcatgatgtgatggttggacctggacgtggttcatctgcaggatctttagttagttacttattaggtatcacgactattgatccaattaaatttgatttattattcgagcgctttttaaatccagaacgtgtcactatgccagatattgatattgattttgaggatacgagaagagaaaaagtgattcagtacgtacaagaaaagtatggtcaatatcacgtatcgggcatcgtcacttttggtcacttattagcaagggctgtagcgagagatgtaggccgtattattggttttgacgaaaaaacgttaaatgaaatatcgaatttaatcccacatcaattaggtattacactagaagaagcctatcaaaatgaaaaatttaaagcatttgttcataaaagttatcgtcatgaaaaatggtttgaaattagtaaaaaactagagggcttaccacgtcatacatctacccatgctgcaggaataattattaatgataaaccattgtatcattttgctcctttaacaatgggggatacaggtatattgactcaatggacaatgactgaagcagaacgattaggtttattaaaaattgattttcttggtcttagaaatttatcaattattcatcaaattatcactcaagtaaaaaaagatttaaatattgatatcgatatagaacgactcccttttaatgatcaaaaagtatttaaattattgtctctaggaaacactacaggtatatttcaattagaatcagaaggtgttagaaaagtattgatggaattacagcctgaacactttgaagatattgttgctgtaacatcattgtatagacccggtccaatgcaagaaatacctacatacatatcaagaagacatcgtcaaagtgacattaaatacttacatcctgatttggagcctattttaaagaagacatatggcgtcattatttatcaagaacaaatcatgcaaattgctagtcaattcgctaattttagttatggtcaagcagatatattaagacgtgcaatgagtaaaaaaaatagagctatcctagaaagtgaacgtcaacactttattgaaggggctgtaagtaataattatgatgcatcaattagtgaacgtattttcgaactaatattaaaatttgcggattatggttttcctagagctcatgcggtgagttattctaaaattgcatatatcatggcttatttaaaagtgcattatcctaattatttctacgcgaatattcttagtaatgttataggtaatgaaacaaaaacggcaataataatagaagaagctaaaactcaaagtttaaatattttacctccagatattaataaaagtcattggttttacaaagcgacagaaaaaaatatttatttatcgttgggcgcaataaaaggtgtcggatatcaaagcgtcaaatctatagtagacgaacgaattgaaaatggattgtataaagacttttttgatttcaccagaagaattcctaaaagaattaaaactagaaaattgttagaagcattaatatgtgtgggcgcatttgattcatttggtaaaactagatcaacactattatctacaattgacgaagttatcgatcaagtttcgaatgttgaacaagatgaatttttatttaatatgttaacaccaaagcaatcctatgaagataaagaagaattcagtgatcaaatcattagtgcttatgaaaaagaatacttaggattttatatttctaaccatccagttgaaaaactattttatatcaaacaatatttaggtatttttacgattaagaatagtttagattatcaacctatacttgttcaggttaatcaatttaagcaaataagaacaaaaactggacaacatatggcgttcttagttctagatgatggtagaaccactattgatggtgttttgtttccagataagtacaaacaatatgagacaatgattcaacaacaaaatgatattctagtcgttcatggcaaatttgaagaacgaaatcaaaagagacaaattatcattcaaaatatggatacaattaacgactttgaaaataacaaattatctcaagccaaacaaatagtgattagaaacgtcaatcaattagaagatattaaatcatttttaatagatcagactacacataacgatttagaagtagttttatttaatgaaatgcaacaacaaactcaatctttaggatttttacaaaaagaaatggaacaagtcgaaaggtttataaagatgttcaagccaagtgacatcagaattatataacttttatatgcaaaaaaattatgatatagttagttgatggttataaagaagaattaataattttattgattttttatctcttgatttaataacatgtagcatataaaaagatttttaaaattgaacttaattgttacaaaaatccctcttttcaaaagtaatttaattataaatcaattagaagttgattgaatgtctttaagagacgatgcattacaaatgcataaagagaatcaaggtaaattagaaatcaaacctgatgatgcgaaagaagtagtgctaaagtagtaggaacgagacgaccttatttttcaaatcaagttaataagatattagcttttctaggtatttttaaagatatcttagatattgaaactactcctttcgattaaagagtggcaccatcagtgacacgagatttaacacgatctgttatagaattaggtgttgcatgtattgaagtagatttccaataagtatatgataaaacaatgaagttaatagatttaaaataaagtaagcgaatttaaaagtaactatttaaaataacgaaattattgagtgagttatgcggaggtttacgcatgtttaaagatttttttaatagaagtagtaaaaaaaagaaatatttaacggtaccggattctaaacaaaatgacgtaccagcaggcatcatgactaaatgtcctaattgtaaaaaaataatgtatacaaaagaactaactgaaaatttaaatgtatgctttaattgtgatcatcatattgcacttcctgcgtacaaaagaatagaagctatttcagatgaaaattcgttcaaagaattcgataaagaaatggtttcttctaatcctttggattttcctggctatcaagaaaaagtcgaaaaagatcaaaagaaaacgggtttaaatgaagccatcgtaactggtacagcagaattagatggcgtgaaatatggtattgcagtcatggactcacgatttagaatgggaagtatgggctcagtcgtaggggaaaaaatctgtagaatcgttgattattgtactgaacatcggttaccatttgtattattttctgcaagtggtggtgccagaatgcaagaaggtattatttcattaatgcaaatgggaaaaacaagtgtatcattaaaacgacattctgatgctggattattatatgtttcatatttaacacatcctactactggtggtgtatcagctagttttgcttctgtgggtgatattaacctaagcgaacctaaagctttaatcggttttgctggacgtagagtgatagaacaaacaattaacgaaaaattgccggaagattttcaaactgctgagtttttattagaacatggtcaattagataaagttgtgcatagaaaagacatgaaagcaacactttctgaaattttaaaactacatcaagaggtgaagacgaatgcttgatttcgagaaatctttatatgagattaaagaaaagattaattcattgaaggaatctcaagaaaaaaatgacgtcgacttacaagatgaaattgacttgttagaagcctctttggaaagagaaagaaaaaaaatatataccaatttaaaaccttgggatcgagtacaaattgcaagacttcaagaaagacctacaacacttgattatattccatatatcttcgactcattcattgaattacatggagatcgtaattttagagatgatcctgcgatgattggtggaataggatatctcaacaatcaaccggtaactatcataggtcagcaacgagggaaagatactaaagataatatttatcgtaattttggaatggctcatcctgaaggttaccgtaaagctttacgcttaatgaaacaagctgaaaaatttaagcgtcctatttttacgtttattgatacgaaaggtgcatatccgggaaaagccgctgaagaacgagggcaaagtgaatcaattgcgaaaaatttaattgagatggcttcgcttaaagtacctgtgattggtgttgtcatcggtgaaggtggaagtggtggtgcgcttggtattggtataactaataaattattaatgcttgaaaatagtacttattctgttatttctccagaaggggcggcagcattactttggaaagatagctctttagcaaaaatggctgctgaaacgatgaaaattactgcaaaagatttactggaattaaacgtgatagatgaagttattactgaaccacaaggtggcgctcataaagacatcgtttttcaagcaaaacaaattaaacaatcttttattcatcagcttaatgaattaaataaattagatggacaagctttagcgaatcatcgatttaataagtttagaaatattggtacttttattaattaacacagaatgactagaaattttaattaaatttctagtcatttttttatataaattaaattaaaaatttaaaacgtttacatatatataatctattaatattaatggaatagataataaaattatggtaatttatacatgaagattattatagttaggaaagggtatgtcgctatgaagagaattgcggtattaacaagtggtggagattcaccaggcatgaatgctgctgttagagcagtcgtacgaaaagcaatttataataatatcgaagtttttggtgtttatcagggttatcaaggtttacttgatgataatatccacaaacttgaattaggaagtgttggagatacgattcaacgaggaggaacttttctatattctgctagatgtcctcagtttaaagatgagagtgtaagacaaaaagggattgagaacttacacaagcatggtattgaaggacttgtagtagtcggtggagatggcagttatagaggtgctcaacgtattagcgaagaaacaaccgatataaaaacaattggtatccctggaacaattgataatgatattaatggtactgatttcacgattggtttcgatacagcattaaatacgattattgactgtgtcgataaaatcagagatactgcttcaagtcatgcgagaacttttgttgtagaagtaatgggacgtgattgtggtgatttagcactgtgggctggattgtcagtaggtgctgaaacaatcttagttccagaagtgcacacagatattaaagatgttgctgaaaaaattgaaagtggtattaaacgtggaaaaaaacattctatcgttatggtagcagaaggttgtatgagtggccatgaatgtgcagaacaattaactaaatatatcaatgttgatgcacgtgtatctgttcttggtcacatccaacgtggtggtagtccatctggtgtagatcgagtgcttgcttcaagattaggcggttatgctgttgaattgttaatgcaaggtcaaacaggattcggtgtaggtatacaaaataaccaacttacagcaacaccatttgatgaaattttcaataatgaaagccataaattcaacactcgtatttatgacttagcaaaagaattatctatttaatttaggaggcttttataatgagaaagactaaaattgtatgtactataggacctgcttcagagtctgaggaaatgttagaaaaattaatgaatgctggaatgaacgttgcgcgtttaaatttctctcatggtagtcatgaagaacataaagcacgtattgattcaattcgtaaagtatctaaaaaattaggtaaaactattggtattttattagatactaaaggacctgaaattcgtacacatgatatgaaagacggcttaattgtacttgaaaaaggtaaagaagttattgtgagtatgtctcaagttgaaggtacacctgagaaattctcagtcacatatgaagatttaattaatgatgttcaaattggatcatacattttattagatgatggtttagtagaattacaagttaaagatattgataaagataaaggcgaagttaaatgtgatatcttaaacactggtgaattaaaaaataaaaaaggtgtaaacttacctggtgttaaagtaaacttacctggtatcactgataaagatgctgcagatattaaatttggtattaaagaagatattgattacattgcagcaagctttgtacgtcgtcctagtgatgtattagatattcgcgaaattttagaacaagaaaataatgataatattactatcttccctaaaattgaaaaccaagaaggtattgataatatcgaagaaattttagaagtatctgatggtttaatggttgctcgtggtgacatgggtgttgaaattccacctgaatctgtgccaatcgttcaaaaagatttaattagaaaatgtaataaattaggaaaacctgttattactgcaactcaaatgcttgattcaatgcaacgtaatccacgtgcaacaagagctgaagcaagtgacgttgctaatgcaatctatgatggtacagatgcagttatgttatctggtgaaacagctgcaggacaatatcctgaagaagcagttaaaacaatgagaaatattgcaatttcagctgaagctgctcaagattacaaaaaattattatctgatcgtactaaattagtagaaacatcattagtaaatgcgattggtgtgtctgtagcacatactgctctaaatttaaatgttaaagcaattgtagctgcaactgaaagtggttcaacagcgattacaatttctaaatatcgtccacattcagatattattgcagtaacacctagtgaacatactgcaagacaattagcactagtatggggtgcatatccagttgttaaaaaaggacgtaaaacaacagatgatttattaaataatgcagtagcaacagctgttgctactgaaaaagttggtaatggtgatttaattatcattactgctggcgttccaactggtgaaaaaggtacgactaatatgatgaaattacatttagtaggtgatgaaattgctaaaggtcaaggtgttggtcgtggatcaacaactggtaaaacagtgatttctaaaactgctagtgatttagaaggaaaagacctaagtcaatcaattattgtgactaattcaatagacgaaagctatgttccatatgttgaaaaagctgcaggtttaattactgaagaaaacggtataacatcaccaagtgcaatcgttgggcttgaacaaggtatcccaactattattggtgttgaaaatgcaacgaaagaattgaaaaatgacttattagttactgttgatgcaaatcaaggtagaatttttgaagggtatgcaaatgtcctttaattaaacaattgtataagtatgtttaaatagaaagctagaagagcgggaataaccacgttacatgttaatggataaaattctcgctcttttttatgttatttaaacatattagaaaaaagtgggagagagccgtattcgtcgtcccaacttgcattgaacgtagattttcattaagaaaatctctatgttggggatagtagtgttgaaaaagcttgttacaagagtatttcaattcagacatcgactgcattaacataaaaatgactgggacattattaatggttccagtcatttttcatattgatattttaatgttattttgctacttttttatatcttaaatacataatacctaaaataataaaccaaataggtgttaagaaaatagcgtttcttgttgttgcatttacaaatagtaaacaaaacacaaataagaagaatgctaaaataatataggccatatattttccaccaggaagtttgaattttgcttttttatgtaattcaggattttttctatgataattaatataagcccaaataattaaagcccacacgataataaataatactgttgaaattgttgtaacatatgtaaatactagcgttgcatttggaaaaatatagtttaataatgctgtcaccaataataacgcagatgatacaataattgcgatatgtggtacaccttgcttgttagtacttttaaatatagaaggcgcttgtttttgttcagataatccaaataacatacgactatttgagaagataccactattacaagatgaagcagcagcagttaaaactacaaagttaattaatccagctgcaaatggaataccaattaatgagaacaatctaacaaatgggctctcatttggatccactttgtcccaaggaataatagacataatgactgctaaagcacctacatagaaaattaaaattctaatcggtactgcatctatagctttaggtattgttttttctggatttttagtttcaccagcagttaccccaatcatttcaataccaacaaatgagaataaagccatttggaatgacataaagaaaccagaagttccattggtaaaaataccatgtttataaagattagttaaacttgcatgtccaaattgagttttataagcaaataaaatcattattgcaccaatgacgattaaagctataatagttataattttaataatagcaaaccagaattctaattctccaaataattttgcacttaataagttaaaaaccattaatattaatacgcaaaataaagcagtaatccagtttggtatagttggaaaccagaaactaacatatttggcaactgcagttacttctgccattcccgttataatccagcataaccaatatgtccatccagtaacgaatcctgcaaatggtccaatatactcgtttgttacatcagcaaatgatttaaaacgagtattttgaataatgatttctccaaggcctctcataaacataaatagcatgaatccaataatgatataggttaatagaatagaaggtccagtcatagctatagtttgacctgcacctaagaataatccagttccgatagcgccaccaagagcaatcaattgtacatgacgattacttaatcctctttgtaatttttcttctgccataagacaactcccttacatttaattaatattaattatgcacttatatattaaattcgacaattatttttctaaattttttctaaaaattttattaacattgagttaataaaagataatcattattgataaataattaaaatattcattattttcacataagtcaaccttgtcttaattcttataaatagctttataacaatttttataatcattataattaaaattaatatataaataatttaccaatgaaaatttaaaccacatatatcatgattcacaaaacttataattttagatatactatttatgaaagccattacattatgtaaaagaaaaggggaattacttatggcagaattacaaaaaggtttagaaggggttatcgcagcagaaactaaaatcagttcaattattgatagtcaattaacttattcaggatatgatattgatgatttagctgaaaatgctcaatttgaagaaatcatgttcttattatggaattatagattaccaacacaagaagaacttgaagaattaaaagagaaactaaaacaatatatgacattaaatccaagggtatataagcattttgaagaatatgctacagatgatgtacatccaatgactgcattacgtacctctgtttcttatattgcacactttaatccagatgctgaagaggaaacagatgaaagtcgaaaagatcgagctattcgtatccaagcaaagattgcatcattagttacagcgttttcacgcgtacgagaaggaaaggaacctgttaagcctaactctgatttaagctatgcagcaaacttcttgtatatgttaaaaggggaattgccatctgatactgaagttgaagcttttaataaagctttaatattacatgccgatcatgaactcaatgcttcagcatttacagcaagatgtgcagtatcatctctatctgatatgtattcaggtattgtagcagcaattggttcattaaaagggcctttacatggtggagcaaatgaacaagtaatgaaaatgttatcagaagttaaatcacttgatgaagtagataattatttagataagaaacttgctaacaaagaaaaaatcatgggattcggtcatcgagtatataaagagggagatccacgtgctaagtacttaaaagaaatgagtcgaaaaataacttctgaaaccggacataacgaattatatgaaatttctcttgcaatcgaaaagcgtatgcacgatgaaaaaggcttaattccaaatgtagacttctttagtgcaactgtttatcatagtatggaaattccacacgatatttttacacttatctttgctgtgagtcgtactgcaggatggaccgcgcatattttagaacaatatcgtgataatcgaattattcgtccgcgtgcaaaatatgttggagaaacaaatcgtaaatatgtaccagttgaagaaagataaaatattttaaaatttaatttatggaggcttttataatggcagctgaaaaaattactagagcaaatgatgaattattaaatgtacctaatgaaccaattattccatttattattggggatggtatcggtcctgatatttggaaagcagctagtcgtgttgttgatgcggcggttgaaaaagcatataacggtgaaaagcgtattgagtggaaagaggtattagctggtcaaaaagcgtacgatgaaactggtgaatggttaccacaagaaactttagatactatcaaagaatacttaatcgcaattaaaggaccattaactacaccaattggcggaggcattcgttctttaaatgtagcattaagacaagaactagatttatttacttgtcttcgtccagtgcgttggtttaaaggtgtaccttcaccagttaaacgtcctcaagatgttgatatggttatcttccgtgaaaatactgaggatatttatgcaggaattgaatttaaagaaggaacagaagaagttaaaaaagttattgacttcttacaaaatgaaatgggtgctacaaatattcgttttcccgaaacttctggtattggtattaaaccagtttctaaagaagggactgaacgtttagtaagatctgctattcaatatgcaattgataataatcgtaaatcagtaacattagttcacaaaggtaatattatgaagtttacagaaggatcatttaaacaatggggttatgatttagctcataatgaattttctgataaagtatttacttggcaacgatatgatgaaattgctgaaaaagatggtaaagatgctgcaaatgacgcacaacaaaaagctgaaaaagatggtaaaattattattaaagattcaatagcagatattttcttacaacaaattttaacacgtccagcagaacatgatgtagtagctacaatgaacttaaatggcgactatatctcagatgcacttgctgcacaagtaggaggaatcggtattgctcctggtgctaatattaactatgagacagggcatgctatttttgaagcaacacatggtacagcaccaaagtatgctaacttaaataaagtgaatccatcatctgaattattaagttctgtattaatgttagaacatttaggatggcaagaagcggctgataaaattactgatgctattgaagctacaattgcttctaaaattgtaacatatgattttgctcgtttaatggacggggctactgaagtatcaacttcagaatttgccgatgaacttattaaaaacttaaaataaatataatatttattttgataaaacagtctaagatggattttgatgtcttagactgtttttttgttcattattaataaatatcatagcaagattaacaaaaatatccttaacaaatagaaaatattaagtaaatgttaagtttatgtaaattcaatatgttgtatgttatttttatttaaatttcagttataataaaattgaaattgttaattctatttagggaggcaaatcatgtcacaaaaagtattagtggttgatgacgagcaatcaatagtaacgttactaaaatataacttagaaacagcaggttatattgtagatgtagcgtatgatggtgaagaagcactcaaaaaagttaaagaggttaaacctgaactgattgtattagatgtcatgttacccaaaaaagatggaatagaagtatgtaaaacgattcgatctgataaaaatcttgtacctattttaatgttaacagctaaagatgatgagtttgatcgtgtgttaggcttagaattaggtgctgatgattacatgactaaaccattctctccaagagaagttgtagcgagagtaaaagctattttaagacgctctcaaattgctaatgaagtcgtaaaagatgacgtggatgatgaagatattgtaattgataatattagaattcgtcctgaattctttgaagtctatagagatgataccttgcttgaacttacacctaaagaatttgagttactactttatcttattgaacgtcaaggacgcgtaattactagagaacatatgttaaattcagtgtggaattacgagtttgcaggagattcaagaattgtagatgttcatattagtcatttaagagataaattagaagaaaatcctaaacaacctaagttgataaaaacagtgcgtggattgggttataaattagaaagacctaaagcttaatgattaaatttcatcatagattattacttctactatgtacaataacaattattagttttataggtttaggtgcaattcttcatcatacgatttatcaaatattatcagatactcaaactagagaattaaatcatctatcagaaaatatcgtaaatttaaataatcgaaataaacaagcagacattcagcgtatagcacaaaatcaaaacttggttgttgaaatttctgaaaatggacatgtgttatatcaaactggtaatcaacatcaaattaatcatactattgataatgcagctaatccttcgaatattatatatcataaaaataaggataaagtggattacacatttaaaaatactgtaagtaataaaacaatatacataagtggtattaatactgaaattttagatttacaaaaaaatatgtggaagtacttatcattaattggaatcattgtgttaattgctatttatttagctgtaagaagcattaatcgcacctatataagaccaatcaacgaagttacttatgcgacatctttaattgcagatggatattatcatgttagagtacctgaaagtaatgtgaaagaaacaaaagcattatttgtcactaccaatgatttagcaagacgattgcaaaaattaaataataaacaaaaaatgcaatctaatcgtcttaaaacaacattagaaaatattcctagctcggtattaatgatagataagcaaggtgaaattgttattgcaaaccatgcttattacgaggtattcaaaccagatagtaaagtcgaaaataaagattatactgtacatttagataaagaaattcaacatcttgttattgaaagctttaaaactgaaaaaccgttgcatgaacaaattgagttatacattaatgatgttcatcaaaaatattttgatgtttcttgtattcccatcttaagtaaagcaaaaaagaaacttcaaggtatggttgtagtattacatgatatcactaatttaaaaaaattagaaaatttgagacgtgagtttgttgcaaatgtttcacatgaacttaaaactccaattacttcaattaaaggatttgcagaaaccttaattgaaggtgcaaagaatgatgaacaatctcttgaggtgtttttaaatattattttaaaagaatcaaatcgtatagaatcacttgtcatggatttattagatttatctcatattgaacaacaaactgagattgagactacttatgttaatctttcagatttagcacataatacaatccataatctacaaactcaagctaagtataaaaacatcgctattaaatctgaaatagaaaatgatgttattattgaagcgcatgaaggaaagttgtctcaagttatcacaaatttactttcaaatgccattaactattcgtacgaaaataataaagttattgttagagtttacagagaagatataaaagttaatctagaaatccaagattatggcattgggatagacaaaaaagatcaaaagcatatttttgagagattttatagagtagataaagcaagaagtcgtgactctggtggaacaggtttaggattatcgattacaaaacatattgtagaagcacttcacggtacaattatggtcgaaagtgaactgaataaaggatcgctatttagagtctcatttatagataaaatcgaataactattttgtcctacaattttaggtcatccacactttaaaatacttttttatgtttttagaattttaaaaggacctaaacttgtaggactttattttttgaaattcgtaaaatatcgttcagtcgttatgaccaaaggtttatgctaaaatataattaaactcattctggaggtttaaaatttgaataaattagtattgatagatggcaatagtttaagttttagagctttttacgcattgccacttttatctaataaagcagggattcatacaaatgcgattcttgggttcgccaaattactcgaaaaaattatcagagaagaacaacctacacatttcttagtagcctttgacgcaggtaagactacttttagacattctaaatatagtgaatacaaaggtggacgtcaaaaaacaccacccgaattaagcgaacaatttccctatattcgacaattgttagatgcttatcatattaaacattatgaattagaaaactacgaagcagatgacattattggtacgctaagtaaagaagcagatcaaaatgattttgaaactattattgtaactggagatagagacttaacacagttagcaactcaaaatgtgactatttattatactaagaaaggggtcacagacgttgatcactatactccagaatttatagcagaaaaatataatggtttaaaaccaatacaaattattgatatgaaaggtttaatgggagatagttcagacaatatacccggtgtagctggagtaggagaaaaaacagcaattaaacttttaaatcaatttgattctgtagaaggtgtctatgagaatattgataaagtatctggtaaaaaattaaaagaaaagctcgaacttagtcatgaagatgcattaatgagtaaagagcttgctacaattaatcgctatagtccaatagaagtcactttaaatgatactaaattaagtgatatcaacgataatcatgaaaaaattgaactttttaagaaattagaatttaaacaattattagcagatatagataataaagcatctgagtttgagcaagaacaaaaacaagtttcttttgatattttgcctacttttgaatatgttgattttaatcatcttgatgaagcagtgattcatttcgaaatagatggttctaattatttaaaagatgatattttaaagtttggattttatgataaagaacgttatatcgtagttgatgcagataatattaaagattatccagaacttattaaatggttagaaaatgaaaattctaaaaaggtagtttatgatgcaaagaaaacatttgttatagcacacagattaaatatcaacattcaaaatatcgtttttgatgcgatgttagcaagctacattattgatccatcacgaacgattgatgatgtctattcggttgtaacaaattatcatcaaacgtatgttaaagaagatgtctctatttatgggaaaggtaaaaagcgacatgttcctgatactgaaattttaaatacgcatattgcatctattactaaatctattgatgctgttaaaccgttaatggaaaaagaactagaatcacatcaacaaatgaatttactaaaagatttagaacttccgctagcacgtattttaagtaaaatggaagaaattggtatttatacagatgtaaatgatttacaacgcatgcaacaagaattacaagagaagttagaattgttagttcaacgtattcatgacgcagcaggtgaagaatttaacattaattcacctaaacaactcggtgtggttttatttgaaacattaaaactacctgtcattaaaaaaacaaaaactggttattctacagcagtcgatgttttagaacagttacagaatgaacatcctatcattaatgatattttggaatatcgtcaattagctaaattacaatctacttatgtggaaggtttacaaaaagtcattagtaatgataagcgtatacacactcgttttaatcaaacattagcacaaactggacgattatcttcagttgatcctaatttacaaaatatacctattcgacttgaagaagggcgtaaaatacgtaaagcatttaaaccttcatctgaagacagtgttattttatctgcagattattctcaaattgaattacgtgtcttagcgcatattacacaagatgacagtttaaaagaagcattcattcatggacaggacattcatactgctacagcacgaaaagtatttggtgttgaagcggaggaagtcactgatttaatgcgtagacaagccaaagctgtaaattttggaatcgtttatggtattagtgattatggcttaagtcaaagcttaaatataacacgtaaagaggcaaaaatatttattgatgattatttagcaagtttccctggagttaagcaatatatgagtgacattgtaaaggatgctaaagcaaatggctatgttgaaacattattgcatcgtagacgttatattcctgacatcactagtcgtaattttaatttaagaggttttgcggaacgtacagcaatgaacactccaattcaaggaagtgcagccgatattattaaacttgctatggtggaatttgataagcaagttcaacatacgtcttacaaagctaaattacttttacaagtacacgatgaattaatatttgaagtgcctaagtctgaagttgaagaatttagtttatttgttgaagatataatggagcatgcattagacttagatgttccattaaaagtagactctaattatggtcctacttggtatgatgcgaaatagaaagaggaatgaataatgccagaattaccagaagttgaacatgttaaaaggggaatagaaccttttattgtaaatgctacaattaaaagtatttcattttctaaaaaagtaattgaaggtaaaagtcagaataaagaaacgattatcaaaggaatgaatttagatggttttcgtttgaattgcgaaggctataagataattaaagtcgaacgaagaagtaaatatattgtttttcatattgaaaaacataatcgtaaacgtgtgttacttagtcatttaggtatggctggtggatttttcattgtcaatcacctatctgagatagcaattcccaactatcgtaaacattggcacgtgattttccatttaaataatggaaaaaaattagtgttttcagatatacgtcgatttggtgagattagaaacctaaattcatttgaagattatccttcatttttagaaatagcgcctgagccttttgacgaagaagcgttacaacattttaatcactatttatctcaaaaaaaagtagccaataaacctattaaacagatgttactggatcataaaatcatagcaggatgtggaaatatctatgcttgtgaagcattgtttagagcaggtatccatcctgcgagaaaagtaaaagatacgtctcatcaagaaagacaaatgctcttttattatgtacaagaagttttaaaagagggtattgataatggtggaacaagtatttcagattatcgtcatgctgacggaaaaactggaaaaatgcaattacatttaaatgtatacaaacaaaagacatgtaaagtatgtggccatgatattgaacaaaaagttatagcatctagaaacagtcatttttgtccatattgtcagaaataaataaagtgagcggtgatacaaatgcctaaagtaattggattaacaggtggaatagctaccggaaagtcaacagtttctaaattattatcagaatatggatttaaaattgtcgatgcagatatagcttcaagaaaagcagtagagaaaggatcaactgctttggaacaaataaaagaaacgtttggtgacgaagcaatcacaagtgacggagaaatgaatcgacaatacattggagaattagtatttaatcatccagaaaaacgattagaacttaatgaaattattcatcctattgtaagaacgattatggaacaagaaaagcaacagtatttacaacaagggtatgatgtgattatggatattccgcttctgtttgagaatgatttacaagatactgtggatgaagtctggctggtctacacatctgaaagtgtacaaattgaacgtttaatgaaacgtaacaatttagacttgaatcaagcaaaagcgagagttcatagtcaaatatcaattgataaaaaaagcagaatggctgatcatgttatagataatttaggaagtaaatctgaattagaaacccttcttaaacaactattgattgaaaaaggatacattcatgaataatatgagaaaaagagtttaggactttatttttagtcttaaactctttttatttatataataaatatattagttatataaacttaaaatgtaaaaaatattacattatttttggtaaacgctttcaatcggaatctattatgttatactaattttataaagtataacatataaaacaaggggtgctttaaatgtcaacaaatattgcaattaatggaatgggtagaataggaagaatggttttaagaattgcattacataatgaaaattttaatgtggttgcgattaatgcaagctatccacctgaaacaattgcacatctaattaactatgatacaacgcatggacgttatgataaaaaggtagaaccaattgaggatggtatacgtgttgataaccataacattaagttagtgtcagatagaaatcctgaaaatttaccatggaaagatttaaatatagatatcgtaattgaagcaactggaaaatttaatcatggtgataaagcagttggacatattcatgctggagctaaaaaagtattactaactggcccatctaaaggtggagaagtccaaatgattgttaaaggggtaaatgatgacaaattagatgttgaaaagtatgacattttcagtaatgcttcatgtacgacaaattgtataggaccagttgctaaagttttaaatgatcaatttggtattgtaaatggattaatgactactgttcatgcaattactaatgatcaaaaaaatattgataatccccataaagatttacgtagagcacgttcatgtaatgaaagtattattccaacttctactggagcagcaaaagcattgaaagaagttttaccagaactagaaggtaaacttcatgggttagctttacgtgtgcctacaaaaaatgtttctttagttgatttagttgtagatttagaaaaaccggtaactgttgacgaaattaataatgcatttcgtcattcagatttagatggtgttttagaagtagaaaatgcacctttagtatctgtcgatttcaatacaaatccacattcagctattatcgatgctgagaatacaattgtaatggatgatcataaggtgaaagtgattgcttggtatgataatgaatggggttattctaatagagtagtagaagtagctgaaatgattggtgaacaactagtagaaaagtctaccgtgactgcagtttaagcttttaataagtaaaagattgttaattttagagttgatattctaatataatgtcattgattttatagattaaaaaattataaaacattaaataatttttttaatgagtcatatgtaggaaagtgaaaaaagaatttatattgaattctatttcactttcctttttatattttattataagtttagacagctaagttgtatcaatttattatcaatacatatgagttcttttgtcataaatcgtttttatagtataatgaagcataatctattcaagagggtgacagatatgaaatgcccaaaatgtagtgccacacattcacgcgtggtagattcaagacatgctgatgaagctaacgcaatacgtagaagacgtgaatgtgagaattgtgggacaagatttacaacatttgaacatattgaagtgagtccacttattgtggtcaaaaaagatggcacacgtgaacaatttttaagagaaaaaatattaaatggtcttgtaagatcttgtgaaaaaagaccagttagatatcaacaattggaagacattactaataaagtagaatggcaattacgcgataaaggtcatacagaaatttcatctagagatataggtgaatatgtaatgaatttgctcatgcatgtagatcaagtctcttatgtacgatttgcgtcagtatataaagagtttaaagatgtggatcaattactagcatcgatgcaaggtattttggatgataacaaacggagtgattcataaatgagttttaaatcttatgagtatggtttaagtccacacgatggatttaaagtatatcgacattttttctttaatcatcaacaattagagatattaaatcgattgtacataccgttaattggctttaaagctattggtgtatatcatttcatgaaccaatttatcgatgaagttgaagatactattctcacacattacactatcatgaatgagcttaaaataaatttattagaattccgtgaatatatggatttacttgaaggcattgggttaattaaaacatttgtaaaacatgatagtaatcagtcattgtttatatatgaattgattcaacctccaacggcataccaattttttaatgatccaatgttatctatatacctatacaatgaagttgataatcgaagatataaagatttaaaagcgtattttgaaaaagatgaaccagatttaaaagaatttcagcaagtaacgcgcaaatttactgatgtattcaaagttccacataaaaatatatctattgatgcttcaacaattcaaaaggaaaatcattcagctactatagatttagataatgaatcatttgactttgatatgttgagagatatgttacaacatcattttataagtggagaaattattactaaagaggcaaaacaattaattttacaattggctactttatatgggttaacgcctacttctatgaaacgaatcattcttaactctatcacacaaaatcaaacgttatcatttgaagagatgagaaaacaagcaaggtctcattacttaattgagcatcaacaacagcttcctaagttacaaactaaagctaatccttctaatcatttagaacaatcacagcgtccaaatgagactactgatgatataaaggaaagtgatagttggtttaagttattagaaaacacaagtcctattgatatgttagcgtcttggtctgaatcagaaccaactttacaacaaaaaagaatggtagaagagttaatagagcgtgaaaaattgtcatttggtgtaattaatattttattacaatttgtaatgcttaagaatgaaatgaaacttcctaaatcctatatatttgaaatcgcttcaaattggaaaaagttaggtattaaaactgcacaacaagcatatgattatgcgctgaaaacaaatcaacaaatcaatgatagtataactaaaaaaacaaaacgtcaatataaacaacgtgacgttgcatcaatagaaaaaacaccaaaatggttaaaagataaaaaccaacaagatgaaaaaccaaacaataatgatgcgcaatttgaaaaagatagagaagcgtttcgtgctcaattagaacaagattgggaggattagatgaaaccatttagtaaacttataaaaaatcaagataatttaaacaaaagaattgctaaaataaaacatcaagtcattaatgattctgatgttaaacaatttttaaatcaacaccagtcagaacttactaatgaaatgattgataaagatttaaatgtacttcaagaatataaagatcaacaaaaacactacgatggtcacgattatgcacactgtccaaactttgttaaaggtcatattccagaattatatatagaaaatgagcgtattaaagttcgttatcgattatgtccttgcaaaattaaatacgatgaagaacgtttaagttcacaactcattactgctcatcacatgcaacgagatacgttaaatgcaaaagttaaagatatctatactaacgatagaagtcgacttgaaatagctatggaagttaacgatatttgtaaaaagttagttaacggtgaacgcgttaagggtctttatatacatggcccttttggaacaggcaaatcttttattttaggagctatcgcaaaccagcttaagtcaaaacatgtgccatctacaatagtatatttacctgaatacattcgtatactaaaaggtggttttaaagatgggagttataatgaaaagttagagcgtatacgagaagcaaatatattaatgttagatgatatcggagctgaggatgtcacaacatgggtaagggatgaggtgataggtcccttattacattatcgtatggttcatgaattaccaacattctttagttcaaatctaaatttggaagaattagaacatcatttatctatatcaaacaaaggggcagaaataacgaaagctgctcgaattatcgaacgtatcaaaagtttagcaaatgaattttatttagatggaaaaaatttacgaaataattgaaatttacaatgtgtgatgtataataaagataaatctaaatcgttgaaataaatgaagatatgataatttaatctctatcatacagcaagccaacaattgatgagaatttggttgatatattaaattattactccttcatatttagatgctggtaatcagtatccggctcaagaccgttatcttatgaagagatatctagaatacatctagataactagggtggtaccgcgacgaactcgtcccttttatagggaggagtttttttattttcttcagcgatcatagaataaaatttatggagggtttcgatatggaacaaattaatattaagtttccagatggcaattcaaaatcatttgataaaggaactactacagaagacattgcacaatcaattagtcctggacttcgaaaaaaagcagtagcaggaaaatttaataatcaactcgttgatttaactcgtccacttgaagaagatggggcaattgaaattgttacacctggtagtgatgaagctctagaggtattacgtcattcaactgctcatttaatggctcaagcattaaaacgaatttatggagatgttaaattcggtgttggtccagtgattgaaggcggtttttactacgactttgacatggatgaaaaagtatcatcagatgactttgaaaaaatcgaaaaaacaatgaaacaaattgttaacgaaaattataaaattgaacgtaaagtggtttctcgtgaagaagcaaaagatttctttaaagatgatccatataaattagaattaatagatgcaattcctgaagatgagaatgtaacattatatactcaaggtgaatttacagatttatgccgtggtgttcatgtgccatcaacttcaaaaattaaagaatttaaacttctttctactgcaggtgcatattggcgtggggatagcgacaataaaatgttacaacgtatatatggtactgctttctttgataaaaaagatttaaaagcatatttagacatgttagaggaacgtcgtgaacgtgatcatcgtcgtattggtaaagatttagaattatttacaaataatcaacttgttggtgctggtcttccactatggttaccaaatggtgcaacaattcgccgtgaaattgaacgttatattgtagataaggaagtaagcatgggatatgatcatgtatataccccagttctagctaacgttgaactttataaaacttcaggtcattgggatcactatagagatgatatgttcccaccaatgaaattagatgaaactgaagaaatggtattacgtccaatgaactgtccacatcatatgatggtttataataataaaccacattcttatcgtgaattaccaattcgtattgctgaattaggtactatgcatagatatgaagcaagtggtgcagtatcaggcttacaacgtgtaagaggtatgactttaaatgattctcatatctttgtacgtcctgaccaaattaaagatgaattcaaacgcgttgttcatatgatacaagatgtttatgaagactttggttttgaagattacacattcagattaagttacagagatcctgaagataaagaaaaatatatggacgatgatgacatgtggaataaagctgagtctatgcttaaagaagcagtagatgaaatgggcttaccatatgttgaagctattggagaagcagcattctatggtcctaaattagatgttcaagttaaaactgcaatgggtaaagaagaaaccctttcaactgcacaacttgatttcttactacctgaacgatttgatctttcttatattggtagtgatggtgaaaatcaccgacctgttgttattcatcgtggcgtagtttcaactatggaacgttttgtagctttcttaactgaagaaactaaaggtgctttcccaacatggttagctccaaaacaagttgagattattccagtaaatgtagatttacattacgactatgcgagaaatttacaagatgaattaaaatctcaaggtgttcgtgtagaaattgatgatcgtaacgaaaaaatgggctataaaattcgagaggcacaaatgcaaaaaattccttatcaaattgtagtaggagataaagaagttgaaaacaacgaagtaaatgttcgtaagtatggctcacaagatcaagaaacaatagaaagagatgaatttatctggaacttagtagatgaaattcgtctaaaaagacgtagatagtcttgataaaataatatccttaatgtatattacaaagtagttaaataaaaatgagttagaggttgcatctttaaaaagtaatacttcagaagttgatatggaacgtatgttgaaagtatgaaaggtaaagatgccgaaacaaatgataaccatacttatgatttgttgggacagttatcgaatagaaactgtactgtcacagtttgtgatgtgctaccgacatagattaagtaatgggtgcatatcttaacggtatgtacctattttttaatttgtaatttgatttacatatcatttataaaaattaaatatgttaattatcttcacataacaaataaatacttagctaacctctacattaagaaagggagcttatatgagtaaagttgaaaatcaagatagcggtatgaagagagggttaaaagatcgtcatatctctatgattgcaatgggaggctgtattggtacaggcctatttatgacatcaggtggtgctattcacgatgctggtgcattaggtgcgcttattgcatatgcaattattggagctatggtattctttttaatgacttctttaggagaaatggctacgtatttacctgtttcaggttcatttagtacctatgcaacacgatttgtagatccatcattaggattcgcattaggttggaactattggtttaactgggtaattactgtagcggcagatgtaactattgcagcgcaagtcattcagtattggacacctatggcagggataccagcatgggtatggagttgtatctttatagttattattttcgcattaaactctttatctgtaagagtatatggtgaaagtgaatattggtttgcacttataaaagtgattacagtaattatttttataattattggtattttaactatattaggaattatgggtggacattttgtaggatttgaaacatttactaaaggtgatgggccaatcctaggtggaaatcttggcggtagtttactttcaatcctaggtgtattcttagttgctggtttctcattccaaggtactgaattaataggtattactgctggagaatctgagaatccagaacgtgctgtcccaaaagcaattaaacaagttttttggagaatattattattttacatcttagccatctttgttattggtatgttaattccttataatagtaatgctttaatgggtggagataacgatgttgcaacatctccatttacgcttgtctttaaaaatgcaggcttagcatttgctgcttcatttatgaatgcagttattttaacttcagtattatcagctggtaattcagggatgtatgcatcaacacgtatgttatattcaatgagtaaagataaattagcattcgcttcgtttggtaaaacgaataaacacggcgtgccatatttatcattgattgctactggtgtacttgtagtcgttattttcttagtacaaaaattaagcggaaatgcttatgaatacattgtagctgccagtggtatgacaggctttattgcttgggtaggtattgcagtaagtcactatcgctttagacgagcatttaatgttcaacatcatcgtaaatcagaattgaaatataaagcgaaatggttcccattcggtccaatatttgcaggtatattgtgtgtgattgtgattgttggacaagatgtggatttcattaaaacagggcactttgatcttaatcgatttattattacgtatatgggtattccagtatttttagtattctttatttatcataaattaagatataaaactaaaaaaatacctcttgaagaagttgatttaagccaagatgtctcaatgaatgaagtaaaacatcactaattttaaaaaacaattgacatgcttaataaaacttgatatgattagtatcgttgattacgaaacgaaccaagtagaaacacccgtttctcacctgtagcgacgcaaaaagctgttggcaggttaatcatgtcacacaattattgtgtatgagtgaagagcgggcaaatattgtccgctctttttgcttgggaaaatttcgtaaaattttgggaggtgtcaaccatagcaaaaaatcaaacgcaagttaacgaaaaaattcgcgcaaaagaattacgtttaattggccaaaatggtgaccaaattggtgttaaatctaaaagagaagctcttgagatggctgaaagagttgaattagatttagtagttgttgcaccaaatgctaaaccacctgttgcaagaattatggattatggtaaatataaattcgaacaacagaaaaaagaaaaagaaatgaagaaaaaacaaaaagttatcaatgttaaagaaattcgtttaagtccaactattgaggaacacgatttccaaactaagttgaaaaatggacgtaaattcttaactaaaggtgacaaatgtaaagtttctattcgtttcagaggtcgtgcaattacacacaaagaaattggtcaacgtgttttagaaaaatttgcagacgaatgtaaagatattgccactgttgaacaaaaacctaaaatggaagggcgccaaatgtttattatgttagcgcctgtaaacgaaaaataatttacttttattaggaggaaatgaatcatgccaaaaatgaaaactcaccgtggagcagctaaacgtgttaaaagaactggttcaggtcaattaaaacgttctagagctttcacatctcacttatttgcaaataaaaatactaaacaaaaacgtaaattacgtaaagctaaactagtatctaaaagcgatatgaaacgcgtaaaacaattattagcttacaaaaaataattaatattactttcgaacgatgataaagcgatatatttaaggaggaatttaacatgccacgagttaaaggtggaacagtaacaagagcacgtcgtaaaaaaacgattaaattagctaaaggttacttcggttcaaaacatacattatataaagtagcaaaacaacaagtgatgaaatcaggtcaatacgcattccgtgaccgtcgtcaacgtaaacgtgatttccgtaaattatggattacacgtattaatgcagctgcacgtcaacatgacatcagctattctcgtttaatgaacggcttgaaaaaggctgacattgacattaaccgtaaaatgctttctgaaattgctatttcagacgataaagctttcggtgaattagtatcaaaagctaaagatgctttaaaataattcatatttaaaagccaataaggtaactataaaaccttattggctttttttatttacttttattcatcaaatattctttaatagaattatgataagtaaacgaaccagttaaatatcattgtgatttaaatcattggtttgttaaactattaaaaaagaatattaatttcaaggagttaactatgtctaaatttgatgaacaaatcatcgtcgtatcaagagaattattatttaataatgaaaaaaatgcatttaatggattcttatcgaaaaacgatggtcaaggtgaagaaatatttaatacgtttaaaaattatgaagtaaaaagacgtggagatatggaagaagatccatcttataaacaacttatttcatattgtcttttagaaaatgaaaatgatgaaatcttagtatatcaacgtttaagtggtggcggagaagaacgcttacacggacagtcttcagtgggtgttggtggacatatgaataatgttgttggcgccgattcaattaatgaagttttaagagtgaatgcacaaagagaacttaatgaagaagtaggattatctgaagatagatctcaaaatatagaatatattggttttattaatgatgatactaatgcggtaggtaaagttcatataggtgttgttttcaaaattaaggtgaaatctagtgatgtagaagttagagaaaccgacactttaaaaattaattgggtatcacaagatgaaataaatgatttaaatcattttgaatcatggagtgcgttaattttaaaagatttaaaataaagggggctcaatatgtctgatattatcccttttcctcaatcaaagcaaaaattatatcataatattttaaatgcacaacaacaaaataaatataaagaaatgtatcaattgtttgatatatatgaagcctcattcgaattagataatcaattatctttgattaaatgtgacatgttaaatgaattagggttatatttagaattaagagaagaagcaattattttcttaaaaaaaggtatacctcattacgacgaactgattattttctatattaaagcattaataggtttaaatcagaattatgaagcaattgaagtcattaatcaaatcattaacgaagtgaaagaacataaaactagaatggcactctttccattaaaagaatatgcacaatctaaattagatgaagacaagaaactttctagtcaattattatcagaatttactagtttagatttaaatcgtcaaactaaattaatgattaaactcattgataacggacattatgaattcagaaagacggttgcttttttattatctaatcaagtagaatcttataatttgaaaagtctcatgcttgagtatttacgtttttcaaattatgatagtgaaataaaaattgagaagtatggttatgaagtcaacatcttacctacaacattaaaaggtttagaacacacagatatgaaaactactgttattcccaaagttctcgatagattagaaaatggagctttgaatatacaaaatgaagctcagtatgtgatgaataatcattcaataaaactatatccacttgatatattttcactttttaatgaagaagattggataatagcttatgatgtttattttaagtcaatgattggtatagaagtaagtgaagcaaatcaagaattattagcattaatttatcagttagataattaaatgtgagcaaatcattttagtttacttaaatgattctgtaaagttgaattattatttaaaatcgcctataaaacattgtttgtgtccatattggacctatgatataatagggaagttgaaaaaattaaaaatgtaagcatggaggtatttatacatgacagcaacttgggaaaaaaaagaaggtaacgaaggtttattaaaagttactgttccagcagaaaaggtaaataaagcattagatcaagcatttaaaaaagtggttaaacaaattaacgtgcctggtttccgtaaaggtaaagtgcctcgtccaattttcgaacaacgttttggcgttgaagcattatatcaagatgcagtagatattcttttacctgaagcttatggtgaagctattgaagaaactaaaatcaatccagtcgctcaacctgaaattaatgtaactcaaattgaaaaaggtaaagatttcgaatttgaagcaacagtgactgttgaacctgaagttaaattaggagattataaaggtcttgaaattgaaaaacaagattctgaattaactgataaggatttacaagatgcaattgatcatagtttaggtcatttagctgatatggtagttaaagaagatggtgcagttgaagaaggagacactgtaaatattgactttgatggttatgtagatggcgaacaatttgaaggtggccaagctgatggttatgatttagagattggttcaggttcatttattccaggatttgaagatcaattagtaggcgttaaaactggagaagaaaaagatgttgttgtaacattcccagaagaatatcacgctgaagaattagctggtaaggaagctacattcaaaactaaagtaaatgaaattaaatacaaagaagtacccgaattaactgatgaaattgcaaatgaattagattcagatgctaattcagtagatgagtataaagaaaacttacgcaaacgtttatcagaagaaaaagcacaagatgctgaaaatgtggaaaaagaagaagcaattaataaagcaactgaaaatacaacaattgatattccacaagctatgattgacactgaattagatcgtatggttcaagaatttggtcaaagaatccaacaacaaggtttagacttacaaacttacttccaaatttctggtcaagatgaatctcaattaagagaacaaatgaaagacgatgcagagcaacgtgttaaaacaaacttaacattatcagcaattgcagatgaagaaaatatcgaagtcacagatgaagatattgataaagaattagaaaaaatgagcagtcaatttaatatctcagtagaagatattaaacaaactcttggtaatactgatatcattaaaaatgatgtacgtattcaaaaagtaattgatttattaagagacaatgctaaatatgttgattcagctaaagacgataaaaaagaagacaaataataaacttttaaattgatataaagtttaaaaaataagtagcaggtgcatcattatatgtatctgctactatatgttttaagcattttagttgttaactatcaatttgcattgtagaatgctatctagtatagtcgtttaaggatagaggtgtaaatgaatgtttaaatttaatgaagatgaagaaaatttaaaatgttctttctgtggtaaggaccaagatcaagttaaaaaattagtagcaggcagtggtgtatatatttgtaatgaatgtatcgaactatgttctgaaattgttgaagaagaattagctcaagctacttcagaagaatttactgaattaccgacgcctaaagaaattatggaccatttaaatgaatatgttattggccaagaaaaagctaaaaaatctttagcagtggcagtttacaatcattacaaacgtattcaacaattgggtccaaatgaagatgatgttgagttacaaaaaagtaatatcgccttaattggaccaacgggtagcggtaaaactttacttgcacaaacacttgctaaaacattgaatgtaccatttgctattgcagatgcaacaagtttaactgaagcaggttatgttggtgatgatgttgaaaatattttactacgtttgattcaagctgctgattttgatattgataaagcagaaaaaggaattatttatgtagatgaaattgataaaattgctagaaaatctgaaaatacatcaattacgcgtgatgtttctggtgaaggtgtgcaacaagcattacttaaaatcttagaaggtacaacagcaagtgtaccccctcaaggtggccgtaaacatcctaaccaagaattgattcaaattgacacaactaatattctatttatattaggtggtgcgtttgatggtattgatgaagtaattaaacgccgtttaggtgaaaaagttatcggttttgctagcaatgaagcagataagtatgatgaagaagctttattagcacaaattcgtcctgaagatttacaagcatatggtttaattccagaatttattggacgtgtaccaattgttgctaatttagaaacattagatgttgaagcacttaaaaatattttaacgcaacctaaaaacgcgttagttaagcaatatacaaaaatgttagctcttgataacgttgaattagaatttactgaagaagctttggcagcagtcagtgaaaaagcaattgaacgaaaaactggagcacgtggattacgatcaattatagaagaatctttaattgatattatgtatgatgtaccttcaacaagtgatgttgctaaagttgtagtaactgctcaaacaattaatgaggaaatcgagcctgaaatgtatgattcagaagggaatttattgaacggtactaaaacttcagcttaattatcaaccatataataaggaagtggtgatagaattcatttgagttcgaaactgcttccttatttttatacatatcatttttttaaaattttagatttttaaacatttatattataataaagcagctataacaatgaagaggtgtttgaatatgaatattaacccaaataatatagaattaatgattagtgcagtgaaagaagaacaatatcctgaaaccaatttaactgaaatcgctttaagtggacgttctaatgtgggtaagtcctcttttattaatagtatgattggtagaaaaaatatggctcgtacttcacaacagcctggaaaaacgcaaactctaaacttctataatattgatgaacaacttatttttgttgatgttcctggatatggatatgcaaaagtaagtaaatcacagcgtgaaaaatttgggaaaatgatagaagagtatttaactaaacgagaaaatctaggtttagtcattcaacttgtagatttacgacataatcctaccgaagatgatgtattaatgtataattatttaaaacatttcgatctggcaacactagtcatttgtactaaggaagataaaattgcgaaaggtaaagttcaaaagcatataaaaaatataaaacaaaaattagatttagatccaaacgatacaattataagttactcttctattcaaaattctaaacagcaatatatttgggatattattgctaattatataaattaaaagacatatcttgtaattaagtgacaaaattttgacttcacattagaatgtttctaatttatttgagcatcaaacttaaattcattctaaaatgtgttatactaacaatattgttagtatatggagggcgttataaatgcattttattgctattagcataaatcatcgtactgctgatgtagctttaagagagcaagttgcttttagagatgatgccttacgattagccaatgaagatttattcgaaactaaagcaattttagaaaatgtaatattatcgacatgtaatcgtacagaagtatatgctgtagtggatcaaattcatacaggacgatattatattcaacgatttttagctcgttcatttggatttaaagtagatgatattaaagcaatgtctgaagttaaagtgggggacgaagcagtagaacatctattgcgtgtaacttcaggtttagattcaattgtgttaggagaaacacaaattttaggccaaatgcgtgatgcatttttcttagcgcaagatttaaaaacaactggaactatctttaatcatctatttaaacaagcaattacttttgctaaaaaagcacataatgaaacagatatcgcagataatgctgtaagtgtttcatatgctgctgtggaattatcaaaaaaagtattaggtaaattaaaaaataaacatgctgttattattggtgcaggcgaaatgagtgaattgtcgttattaaatttactcggctcaggcattaatcatattacaattgtaaatcgaacagaaagtaaagctagaattttagctgaaaaacaccaagttagttatgataagctagaatctttacctagtttattaacttcaactgatattgttattagttctactagttcaccagattatattattactaaaagtatgattaatcaggcactatcatatagaaaatctaaattattattattagacattgcagtaccacgagatattgaaccatgtcataatttaagtgatgacgtatttaattatgatgtagatgatttaaaaggtttagttgatgctaatttaaaagaacgacaaatagcggctgaagctatttctaatgaaattcctactgaaattaaagcacataatgattgggtaaatatgttgggtgtagttcctgtaataagagctttacgtgaaaaagcaatgactattcaagctgaaacaatggatagtatcgatagaaaattaccgaatctatctgaacgagaacgaacagtcatttctaaacatactaaaagtattattaatcaaatgttgaaagatccaattaaacaagctaaggaattgagtaacgataaaaaaagtaatgaaaaattagagctatttcaaaatatatttgatattgaagccgaagatccttacaaagcagtgaaagaacgtaaaaaagaaaaggaactttcagtacgacatatctttagttttgaataagcatattaaaatggtgataatatgcaagaaacgctatttattagatttcatgaaattatattaattgtatatttaattagcattctttgttattttatagactttgttcggaagagtcataagattagagtacttggaatttatgccttagggattgtttggtttttacaaacaatctctttgtctatgtatattacttcgcatagtgatatattgtttaattccatatttgatgtttttttcttcttgtcatggatgattatttctatttctttagttttaaatattattaaagttttaagtttttctgtgttttttttgaatgtaattggatttatcttattaacgatgaatacatttagacctgaacactatacaaacagtatacaaagagtacaagttataaatgaattattacttgtacatgtagggcttgcagtattgagttatgctttttttgcacttgcatttgtaaatgcattgctatatatcattcaatataaaaaccttaaagaaaaaaactttaatcagaaatattttagaattggcagtgtagcaactcttgaaaaaattatatttttttcaactttgggcggtttagtgatattaatattgagtgtaattttaattgctcaatggggaatctatgcggttggtgtagcaatatttaaagatccgaaggttatgttgtctgtcattattacgcttctttatacaggatatatcgttatgtatttaaaaaagaaaatcatctcaattaatttaatttattttaatattatgatattttgcctatgtatggtgaatttattcttcactactcattttaattaaaagaaaacttatgtaggaggccttgtttatgcgtaaattagttgtgggttcacgtagaagtaaacttgctttaacacaaagtaaacaattcattgataaattaaaagccattgatccatctttagaaatcgaaattaaagagattgtcacaaaaggagatcgaattgtgaatcaacaactatctaaagttggaggaaaaggcctatttgttaaagagattcaaaatgagctatttaacaacgatatcgatatggcaatacactcattaaaagatgttcctagtattattccagaaggtttaacattaggttgtattcctgatagagaaataccatttgatgcctatattgccaaaaatcatgtaccattagaagaacttcctaaaaatagtatagttggtacaagttcattaagaagaggggcacaaatattatctaaatatcctcatctaaaaattaaatggattcgtggtaatattgatacacgtttaaataaattagaaacagaagattatgatgcgattattttagcagcagcaggactcaaacgtatgggttggtctgatgacgtagtaacaacttatttagataaagacacattactacctgcaatcggtcaaggtgctcttggcattgagtgtcgtcgtaacgatattgaacttctcgagttacttcaaaaagttcacaataatgaagttgcaaattgtgtaacggccgaacgaacatttttagctgcaatggatggaagttgtcaagttccaattggtggatatgcgaattataacaataacaatgaaattgagtttacaggcttaatcatgacaccagatggtaaggaacgttatgaacatactgaagtaggaactgaccctgtaaaattagggaacagagtaagtgagatacttaaagaacaaggtgcgtatgaaattataagaaaattaaacgaagaagcatcacattaatactaaatcttagtagaggtgttacagttagatgaaaccagtgatagttatgacgcaaacgagtaaagtacagagtgatatggtagaagtcattcataagccatttattaaaattcaatcacttgaatttgatactcaactcttgcatgataattatgactggcttattttttcttcaaaaaatgccgtacatttattttataaatatttagagtacgtgaatgtaaaacatattgcagtagtaggcgctaaaactgcgcagttatgtaaacaattaggtataaatatagattttatacctaacgattattctcaagaaggtttattagaaggattaaatctagaaaaatcttctattttaattccgagcagtgcacaggcaagaccaaaattgcaacaaacactcgctgaacataataatgtagtgaaaattgacttgtatacgcctatagcggatagagagaatattattgaagttatcaatctaattcaacataatcaagttgaagcattaacattttcaagttcatctgcagtgcgttattattttagtgaggcatttcctaagcattttaaaaattactatgctataggtcaacaaactgcaaatagcattagagcctatggttatgaaccttatattgcagataaacaaacttctgaagcattaataaacacatttttagaaagtaggaataaataatgaaattcgatagacatagaagattacgctcttcagctacaatgagaagtttagtaagagaaaatcatgttagaaaagaagatttaatttatccaatctttgtagtagaaaaagataatgttagaagcgaaattaaatcgttacctggtgtatatcaaataagtttaaatctattagatgatgaaattaatgaagcatatgagttaggtattagagcaattatgttctttggcgtacctaatgaaaaagatgatgtgggttctggtgcatacgatcataatggcatcgttcaagaggcaacacgtagagcaaaaaaacttcataaagatttattaatcgttgctgatacttgtttatgtgaatatacggatcatggtcattgcggtatcattgatgaacatacacatgatgttgataatgacaaatctttaccattattagttaaaacagcaatttctcaagtcgaagctggcgctgacattattgctccaagtaatatgatggatggttttgttaccgaaattcgacaaggtttagatgaagctggttattataatattccaattatgagctatggcattaaatatgcttctagtttctttggaccatttagagatgctgcagattcagctccttcatttggagatagaaaaacgtatcaaatggatccagctaatcgtttagaagcactaagagaattagaaagtgacttaaaagaaggcgcggacatgatgattgtcaaaccagctttaagttatttagatattgttagagatgtaaaaaataacactaatattcctgttattgcttataatgttagtggtgaatatgctatgactaaagcagcatctcaaaatggttggatagatgaagaacgtgtggttatggaacaaatggtatcaatgaaacgtgcgggcgcagatatgattattacttatttcgcgaaagatatttgtcgttacttagataaataatggttaaggaggaacaagttaatgacttatgaaaaatcacaagaagcaatgcgcattgctgaaacacttatgcctggtggtgtcaatagccctgtaagagcatttaaatcagtagatacaccagcaatttttatggatcatggtgaaggttcaaaaatttatgatatagatggcaatgaatacattgattatgtattaagttggggaccattaattttgggtcataaaaataaacaagtcattagtaaattacatgatgctgtagataaaggtactagttttggtgcttcaacactagaagaaaataaattagctgaacttgttattgaaagagtaccttcaattgaaaaagtaagaatggtttcttcaggtactgaagctactttagcggcattaagactggctagaggttacactggtaaaaataaaattgttaagtttgaaggttgctatcacggacatagcgattcattgcttatcaaagcaggttcaggtgtagcaactttaggtcttccagattcaccaggagtacctgaaggcacagctaaaaacacaattacagtgccttataatgatttagatgcgattaaagtagcatttgaaaattatggagatgatattgctggtgtgatagtagaaccagttgcaggaaatatgggcgttgtacctcctaaaaaaggtttcttagaaggattaagggaagtcactaaagaatatgattctttacttatctttgatgaagtcatgacaggtttccgtgtagggtataactgtgctcaaggttattttggtgtgacaccagatatcacatgcctaggaaaagtgattggcggtggtttacctgtaggtgcttttggaggcaaaaaagaaattatggataaaattgccccagtaggtaatatttatcaagcgggaactctgtctggtaatcctttagcaatgacaagtggttatgaaacactaagtcaattaacgcctgaatcatatgagtatttccaaaaattaggcgatatattagaaaaaggacttaaagaagtatttgctaaacacaatgttcctattacagtaaatagagctggttctatgattggttatttcttaaataaaggacctgtaaccaactttgaagaagcgaatcaaagtgatttagagctatttagtaatatgtatagagaaatggctaaagaaggtatatttttaccaccttcccagtttgaaggaacattcttatctactgcacataccaaagaagatattgaaaaaacgattcatgcttttgataatgcattaagtagaattgtttaatatttaaaagttaatataataaaagtggaacaaagatgaaatcatatcacgttccactttttttaatttaaatgcttttaatctagaaagaagtgatgatttttgaggcgaatttggctaaataatattatattattaataatagcgatgatcatgagtttaatattaaaattatctcatatgcttttaccctttatgtttgggcccattatagcctcaattattgtggttaaagtactaaaactaaatattaaatggcctttttggattagtcagattggcttaatattacttggagtacaaataggatctacttttacgtcacaagtcattaacgatatcaaaaatgagtggttaaccattgtgacggtgactgttttactcatcacgttatcattattgattgcttattttttcaaaaaaattgcaagagttaatactgaaactgctatcttgagtgtcatacctggtgctttaagtcaaatgttaattatggctgaagaagataaaaaagcaaatatcttagtagtaagtttaacccaaacttctagagttatttttgtagtcgtacttgtaccactgatttcttttttatttagcaattcatcatcaagtgaagagatgattcataaagctacaccattaacaagagctttaaatgtgccccaaattgccttaattatgattagtatagcttttgtttatttcttaatgtcaaaaataaattttccaacaaaacaattactcgctccaattatcgttttaattgtttggaacttatcaactcatctgatttttactttagataattatattcttgcttttgcacaagtgatttatatgattagaattggtttacaaattgcacatttattaggtgatttaaaaggtcgcattgctatagcaattatgtatcaaaatataagtttaattttagggtcatttttgatggtctttatggttcatttgtttactcataattcattaaacgaattatttttaggtggagctcctggaggtatgagtcaaattgtgctagttgccatagctactggtgcagatgttgctaagatatcaagttttcacatctttaggatattttttatattatttttagtagcaccaataattaattactttttaaaacgtaaaaaaaatgataatcaatcataaggagtagaactacgaattcaaaataatctgttctactccttttaatatttaatgattaggttttgaaggacatccttctaagtgagtatcatatagaccagccgcttccataaaagagaatacagtcacaggtcctaaaaatttaaaaccataagtttttaaatcttttgaaagttgttttgctctttcatcaactgtgatacgttctgaaggagttttatagtgcaaatcaatgggatgtccatcaacatatgaccataaaaacttactgaagctaccatattctttttcaatttgtaaataacccttagcttgagatactatggcttctaatttctttctattatgtacgatatttggaaaggtcattaaagcattaatatctttctctgtcattttagaaatttttataggatcaaattgatgaaatgctttttcataagcctctttcttttttaatatagttaaccaagataaaccagcatgttgagattcaagtgcaagtaatttgaaaagtgaaagactattaaaatctggttgtccccatactttattatgataatctaaataaatagggtctgtagttccaaaggcacatgcgttcataaatattcctccaaaagattgacttatcattgttttctattatattattaattagtaattaaatatattttttgggaagagtacgtttgatacttatcaaagagagcatatggacggtgtaaatatgtataatgatcaaactgaaggtagcccacaagttcttttattgaatacacatataatagtagatagaagcgtgtatgagcgttaatcataaataagtgcaagaagatatggaggtatcgtcttgaatttaggtggtaccacggagcatccgtcctatatattaggaaggatgcttttttattttaggaggttatttcaatgaaaatggaatcaaagtataatcctcgtgaagttgaagcggggcgttatgaagaatgggtaaaaaatgaatactttaaacctctagaagatgaatctagagaagcatatacaattgttattccaccaccgaatgtgactggtaaattacatttaggacatgcttgggatacaacattacaagatattattactcgaatgaaacgtatgcaaggatatgatacgctttatttacctggtatggatcatgcgggtattgccacacaagctaaagtagatgctaaattaaaagaacaaggtatttctcgtcatgatataggacgtgaaaaatttttagaacatgcttggtcttggaaagaagaatatgcatcttttattcgtaaacaatgggctaaattaggcttaggtcttgattatagtagagaacgttttactcttgatgacggcttaagtaaagcggttagaaaagtatttgttgatttatataataaaggaattatttatcgtggagagcgaattataaattgggatccagtcgcacgtacagcattgtcagatatagaagtgattcatgaagatgtgcaaggtcatttttatcattttaaatatccttatgctgatggtaatggatatattgaaattgccacaactcgtcctgaaacaatgctaggggatactgctatagtcgttaatccaaatgatgaacgttataaagatgtcatcggaaaaaaagtgattttaccaattataggtagagaattaccaattttagcagatgagtatgttgatattgaatttggtagtggcgctatgaaagttacacctgcacatgatcctaatgactttgaaattggtcagagacatcatttagaaaacattatcgtaatggatgaaaatggaaaaatgaatgacaatgcatctcagtatgctggtttagaccgtttcgaatgtcgtaaaaaattagtagaagatttaaaagctcaagatttagtgattaaaattgaagaacatatgcattctgtaggtcattcagaacgttctggtgcagtagtagaaccttatttatctacacaatggtttgtaaaaatgaaaccacttgcgcaacaagcactagataatcaaaaaacagataatcgaattgatttttatccaccacgttttgaaaatacatttaatcgttggatggaagaaattagagattggactatttctagacaattatggtggggtcaccaaattccagcttggtatcataatgaaacaggtgaagtatatgttggagaagaagcgcctgctgatatcgaaaattggactcaagatgaagatgtattagatacatggttctcaagtgcgttatggccattctcaactttagattggcctaatgaagaagcaaaagattatcaacattactatccaacgaatgttcttgtaactggttatgatattatcttcttctgggtagcaagaatgattttccaaggattagaatttactggtaaacgaccatttaatgatgtacttcttcatggtttagtaagagctgaagatggtcgtaaaatgagtaaatcacttggtaatggtgtagatccaatggatgtcatcgaaaaatacggggcagatagtttacgctacttcttagcaactggttcttctccaggtaatgacttacgttattctaccgaaaaagttgaatctgtatggaactttattaataaaatttggaatggcgctcgctttagcttgatgaatattggagaagactttaaagtggaagacattgatttatctggtaatttatctttagcgaataaatggattttaacacgactaaatgaaacaatagagaccgttactaatctgagtgaaaaatatgaatttggtgaagttggacgtgctttatataactttatttgggatgaattctgtgattggtatattgaaatgagtaaaataccaatgaatggtgaagatgaagctcaaaaacaaacaacacgttctgttctaagttatacacttgatcaaataatgagaatgctacatccatttatgccatttgtaactgaaaaaatttggcaaagtttaccgcatgaaggagaaacaattgtaaaagcagcatggccgacagttaaagaagagtttgtgtttgatgaaagtaaacagacaatggaacaattagttgaaattattaaatctgtgagacaatcacgcgtagaagtcaatacaccactttctaaatcaatccctattctcattcaagctaaaaatgaagaaattgaaacaatcttagaaaaaaatgctgattatattcacagattttgtaatccaagcgaattaaccattgatacaaatgtagatattcctgaaaaagcgatgacagcggtagtagttgctggtaaagtaattttaccgttagagggacttattgatatggataaagaaattgaacgcttagagaaagagttagacaaacttcaaaaagagttagaccgtgttgataaaaaattatcaaatgagaattttgttaataaagcacctgaaaagattataaatgaagagcgcgaaaaacaacaaaaatatcaagaaaaatataatggtgttaaaaacagaattgaacaattaaaagcataggagaattgtcaatgaattacctagatagcttatattggatacatgagcgcactaagtttggtattaaacctggtgttaaaagaatggaatggatgcttaaccacttaaataatcctcaattaaatattcgcggtattcatgtgggtggaacaaatggtaaaggttctacagtagcttatttaagagctgcattagttgagaatggatatgaagttggaacatttacttctccttttattgaaacgtttaatgaacgaattagtttaaatggttatccgatctcaaatgacgaaatagttgaattagtaaagcgagttaaaccagtaagtgaagcgttagaacaagaaaccgaactcggttctgcaacagaatttgaaattataacaacaatgatgtttttatattttggagatatacatcctgtagatttcgttattgtagaagcgggactaggaattaaaaatgactcaactaatgtgtttactcctattctttcaattttgacaagtataggattagatcatactgatattttaggaagtacgtatttagatatcgcaaaagataaaggtgctatcataaaacctaatgtacccgtcatctatgcagtaaaaaatgaggaagctttaaaatacattagagatttagcggaaaatcagaatgcaaagccaattgaactagatagagaaattattattgtatctgaagatgatgaatttacttatagatataaagattatgagttagaaacaatcatcttagatatgataggtgatcatcaaaaagaaaatgcttcattagctattacagctttaatagagttgaacgaagaaaatattattgaattagattttaataaaatgattgatgctattgaaagtgtttgttggacaggacgtattgagcaagttaaagaaaagcctcttattattattgacggagcacataataatgaaagtgttgaagcattagtttcaacaatcaaaaattattatgatcttgagaaaatggatgttttattttcagccattaaaggtaaacctgtaaacgaaatgttaagtaaattacaaaatttagctggtgccttttattttactgaatttgattttcataaagccttatctaaacaagaattacttgagagtatagatgctgataacatcgaatatattgatgattatgtagattttataaatcattatgatggtgagggcttattgattacaggtagtttatattttataagtgaagtaaaatcgaaagttgaatttaattcataatatatagtatgttaaatgtctaaatatagctatgaagaaagttacaaattaaacttcttcatagcttttttattagttatataattgatagattaagagtggactgattatttttaataaaagttttattcattttattgaatttaaaatgctttaaagaagatatatttatttattgaaatgaatttaatctaatcctcgttattccatttacttagaccatattttagttataatgaatgatatgaggtgataagtataatagtattattagcatttacgtgtagtgtaatatttagttttttatatcaattttcaagtatagagaaagtgaatcttcaatatttcaagcgacgatcccaatgtgattattgtcatacatcattaaagtggtttgatactataccattattaagtttcatattcttaaaaggacgctcgagatgttgttcaaatcctttaaagcgttcctatattataggtgaaatattatcgtttcttattgtcccatatttaatatttatcgatatacatataaattattctctctttatattaacttgtttaatgttgataacgatgtctctaaccgatattcaaacattaacaatcaacagtaacttaatcctcatttttttcattgtcggtatatatatttcttcattacatttgatttcatttatatttattttctttctattacatacattttttctgttaaattctaaaagtatagggtacggtgatattttattacttagtatactttctatattttatacttatgaatttatgcttcatctaatattattaacttgtgcaattggtcttatgttttatatcatcatgtttcgttttaagatacgtaaaatcccacttattccttttatttcaatctcatatattttattaattaatttttccaacaatattatgtaactaataaagaaaaggtgatgtttttgaaaattaaagatatggccaaaagtgagcttcctaaagagagactcattcaatatggtgaaaaaagtttgtctaacagtgaattattagcaattttaattaacactggacgacgaggggtttcaagtattgatattgcgaatgaaatgattaataaagtaaataatttaaaagaattaaaattactttcaatacatgatttgttaaaaataaaaggtataggattgcataaagcagtgacattaaaagccgctttcgaattgggagaaagaataaataaacgtaattcgattgaaaaagtaaagattaaatctcctaaagatgtcgcagatatgatgatgtctaaaatgaaagatttaactcaagagcatttagttgctttatttttaaatactaaaaatatagtgattaaagaagaaactatatttataggaacattaaactcttcagtgatacacccgagagaagtctttaatgctgccattagagcttcatgtaatgcaataattgtgattcataatcatccatctggagatgtgacgccttcaaaagaagatattgctactaccattagacttaaagaatgtggacaaattcttggcattgaattacttgaccatattattatcggtgatcaaaaatttactagtttagtagaggagggatatttcgtataaaaggttaaaaagtatttatagtctcattgttaaaattttagtataataaaccttaattatatatttagaggtgtacgatgactttatttttaatcataggggtattaatacctattatttacataatgagattgaatattaaacaagaaacaattcgtttaaaagaaacacttaatactgtattattatcgattgttggtattacaactttttcttttattggagtattcgttaaccaaacgcatactcaattatatattttactcattagtgatatagtaactggaacgatatttgggttactattagcaacaatatataaaatttatgaatacttgtctcaaagcaatcgtaaataaagctagttaacttttcatacaatacaatcataaacgaattaataaagggatagattgtatcaattacattgaaaagtaactagctttttcattatcttatataagctgaaagcacattaaaattttctaaaatccaaagaacaccttgataggctaaatacagtccgagaataataaaagcagcagagattaaaaatcttaaaagtgcaaatcctactttaaaaagtataactgcaagcaagataagtaaaataattgtaagaatgttcatttctcacactcctctaaatttattttacgagtgatattaattattataatatattttaagaaaatgttaatcagtctaaagaatttacttaatttacttctttagaccgatggatgaaatctattttatatttataataatttaggtttaaaattggagggatttaattgcgaatggtatttagtatttttaaaaatatagtagcagttattgcaatccttagtattgtttattttgcattaaaatatgccccatttttaagagaacaggactggaatcctatgaatcaacctcttagtaaccaattcgagcttctaccaagtaatcaaacatcaacaccagtgcccactaatggaaaaagttatactatagaagaaaacaatttacttcagaatattcctgctagtcaaacgaaaaatgtatttaaatttatagataaaaaagaatttatggaagtttcaggtatagttaggatgggatataatgaaaattacattgtagggcaaagagataatgaatttatcatctataaattcggaagtgatacgattaaagtctttagtacggaaattgaaatggaacaggaattaaatcgtctaggacaatcaattactttaaaacctcagaatgagtattaaaaaatataatttgaaaaaaataaataaatgcgttaatgtctagaatagatacaataatcttttgaaggttggtgtaatgtatgtctgaacaatctaaagaaaaacaagcaaatgaacaagcaaaagcacaaaatttattttcgaaatggagaaaagatgaaacgctctatgaagaagataaaaaagataattcgaataaaaaatcgtaaaattaaataagatgacatttgataggagcaagtactagaattcaatgaagattctaacttgttccttttttcttctttgaagataatatttaatattattctttatttcaatcctagagtaatataaaatagaatataatagtttaaaataaatagtagaggtgttatgagtgttaaatttttttaaaaataacaagttaattgttgttttttgtgcaataattatttttattgcattgattggtttgtccattcgttcacaaactcaatcacctcctgagcaatatgtgggggactcagtgtcatttggtcagagagtaattagttacccggtaaactttgtgactggagctataggtaacttcttaaaatctaacaaatcaaatcataatgaagttaatcaattaaaagcaaaaaacgaagcattagaagctgaaaataaaaacttaaaaaaagaacttgatatgactgatgcttcaaaatacgatgcaatttcaggtgccatcatagcacgtaatccagatcaatggatgaatacagtgattattgataaaggtaaaaaagctggtgtaagcaataatatggcagtgtttactagtgatggtttaattggaagagtaactagagtgaatcaattttcttctcaagttgatttactttctacgagtacaagagctggaaaactatcagtcaatattcaacatcattctaaaaatgtttttggattaattgatcactatgataataaaactcaggaattaattattagtaatatcaataataaggataaaatttcaaaaggtgacaaagtagtaacaagtagattagccgaccaattgccaagtgatttatacataggagaagtgacgaaggtagaaaatgatgaatatggtttagcaaaagaagtgagagtgaaaactggagctaatttatcagatattcaacatgtatacatagcgaaaaaaagtaataatacggatttcaatgaaagagagacccgataatgaaagcgttcgtttatataatgattggtatcatcgttttttatcttgatacacttattagtttagttattccttttcatataggaaacctaacatttatcttagttcctcatttaactttaatgtatttattacttttatcaatttatagaccatttatggtcacattattactaagcatttttttaggtattataactgatatctactttggcagtgtatatggtttatatttgtttggttatatattcttaataacaatatttaataaattcttgaagattttttaccgagactatattatggtatattggttcagtatcattggtgtaatgattcttgaaatatttgtagcaattatatattctgtcattagctatgtagaatttgatttactaaattttatattactacgtattatcccaacacttatattaaatattattttattaattatttttatgcctatattctttaaattttttaaaaagccaatataatagattgacattgaatataagtaatggtaagatgcagtagttgagtagttttatagctacatacaaccgctcaaatacaggtttaagcgttaaaatgtttttattttatcacctgtatatggcgtgacttataattataggaggtgcaaagtatgtttgctattatcgaaacaggcggtaaacaaattaaagtagaagaaggtcaagagatcttcgttgaaaaattagatgttaatgaaggtgattcattcacatttgataaagtattatttgtaggtggagattcagttaaagttggtgctccaactgttgaaggagctacagtaactgctactgtgcacaaacaaggtcgcggtaaaaaaattactgttttcacttacaaacgtcgtaaagattcaaaacgtaaaaaaggtcatcgtcaaccttatactaaattaacaattgataaaatcaacgcttaattatgattactgttgatatttcaattaatgatgaaggtaaagtaacagacgtcattatggatggccatgctaatcatggtgattatggctatgatattgtttgtgcaggggcttcagctgttctttttggaagtgtaaatgctattttaagtttaacttctgaaaagccggatatcgattatgatgatgacggtggtcattttcacattagatcagtagacactaacaatgagcaagcacaattaattcttcaagcaatgcttgtgtctttacaaacgattgaagatgaatataatgaaaatatcagattaaattataagtgaggtgtatcccgatgttaaaattaaacttacaattcttcgcatctaaaaaaggggtaagttctacaaaaaacggtcgtgactcagaatcaaaacgtttaggtgctaaacgtgcagacggtcaattcgtaacaggtggctcaattttatatcgtcaacgcggtactaaaatttatgctggtgaaaatgtaggtcgtggtggcgatgatacattattcgctaaaatcgacggcgttgttcgtttcgaacgtaaaggtcgcgacaaaaaacaagtttctgtatatgcagtagctgaataatttttgtctaattaacaccagaagtgaagacttctggtgttttatttttgtttaaaaatgattataatagaatctaacgttttagagttaatgatataatattagcgatgaattaataaaatatataaaaagaggtgagatatatgtttgtcgatcaagtaaaaatatctctaaaagcaggcgatggaggtaatggtattactgcttatcgtagagaaaaatatgtaccatttggtggccctgccggtggtgatggcggtaaaggtgcttcagttatttttgaagttgatgaaggtttaagaacacttttagactttagatttcaacgtcattttaaggctaaaaaaggtgaaaatggtcaaagtagtaatatgcatggtaaaaatgcggaagacctagttttaaaagtgcctcctggtaccattattaaaagtgtagaaacagaagaagttttagcagatttagttgaagaaggtcaacgtgcagtcattgctcgaggaggtcgaggaggtcgaggaaattcacgttttgcaacccctcgaaatccagctccagactttagtgaaaatggagaacctggagaagagctagatgttaccttagaattaaagctacttgctgatgtgggactcgttggattcccaagtgtagggaaatcaacattgttgtctattgtatctaaggcaaaacctaaaattggtgcttatcattttacaacaattaaaccaaatttaggtgtggtttcaacacctgatcatagaagttttgtaatggcagatttaccaggtttaattgaaggagcttcagaaggagttggtttaggtcatcaatttttacgtcatgttgagagaacaaaagttattgttcatatgatagatatgagtggttctgaaggaagagatccacttgaagattatcaaatcatcaataatgaactgataaattataaacaaagattagaagatagacctcaaattatagtggcaaataaaatggatataccggaagcaaaagataacctagaattatttaaaaaagaaattgatgaagaggtaactattgttccagtttctacaattacaagagataatattgatcaattactatatacaattgctgataaattagaagaagtaaaagatattgattttagtgtagaagaagatgaagatgcaggtgttaatcgcgtattatataaacatacgccatctcaagataaatttacgattacaagagatgatgatggtgcctatgtagtaagcggtaatgcaatcgaacgcatgtttaaaatgacagactttaatagtgatccagcagtaagacgctttgcacgtcaaatgcgctctatgggtattgatgatgcattaagagaacgtggatgtagtaatggtgatattgttagaatacttgggggagaatttgaattcgtcgaataggagggctttttagtggacagcaaagattataaaaagttttatttaatacgtgaagacgttttaccagaatcagtggttaaaacgcttaaaattaaagacgctttaaaaaatgattccacactgtccatttatgaagcagttaagcagtttaatctatcaagaagtgctttttataaatatagagatactatttttcctgtagatgacaagatttttgaacaccgtgaattcaccttgattctctatgttaatgatatagtaggaatgcttgctcaagtactacaaattatttcaaaactagcgttatccgttttaactattcatcaaagtgttccaatggaagaaaaagcaacgattacactctctttgagtgcaaaagatcaatcattatcaatagaaaaggtcatgggcactttgagaaatattcaacatgtttataaagttgaattaattagtatgagtatgtaaggaaggtatttatgtacgcttatataaaaggacatttatctcaattgtttccaacacatattgttgtagaaacgtctagtggtatcggttatgaaattcaaactccaaattcatatcgatttcaaaaatatttaaatcaagaatgtaaagtctttacttcacttattgtaagagaagacgcacaattattatatggttttattagcgaagaagaaaaagagatgttcttaagcttaataaaagttacaggtataggccctaaatcagctttagctattctagccacaagtacacctaacgaagttaaacgtgcaattgaaaatgaaaatgatacttatctaactaaatttcctggtataggtaaaaagactgcacgacaaattgtattagatttaaaaggtaaagttaagattacagaagagactagtgagaccttgttacaagttgagggacaagttgaagaaaatgacaatataattaaggaagcattattagcgcttgcagctttaggatactctaagagagagctttctaaagttgaaaaagtacttaataaaacatccattcactctgttgatgaagcagttaagattggtttaaaaacgcttgtatcttaatattatgaacgataactggggggataaatatggatgatagaatggtagatcaatcattacacaatgaagaatcttcttttgaattctcactcagaccaactaaattaaaacaatatattgggcaatcatcaataaagaacaatttagaaatttttataaaagcggctaaactaagggatgagccattagatcatgtattactttttggccctccaggattaggtaaaacgacactttcaaatattattgctaatgaaatggaagtcaatataagaactgtatctggtccatcattagagcgacctggagatttagcggcaattttatctgggttacaacctggcgatgttttatttattgatgaaattcatcgcttaagtagtgtagtagaagaagttttatactctgctatggaggattttttcttagatattattatcggtaaaggtgatgaagcacgtagtatacgtattgatttaccaccttttactctagtaggtgcgacaacacgtgctggaagtttaacaggccctttaagagatcgatttggtgtccatttaagattagagtactattcggaatcagatttaaaagaaatcattattcgaactgctgaagtattaggtacaaaaattgatgataaaagtgcagttgagcttgctaagcgttcaagaggaacacctcgtgttgcaaatcgactactaaaaagagtaagagattttcaacaagtaaatgaagatgaacaaatttatatcgaaacaacaaagcaagctttaaacttattacaagtggatgatgaaggcttagattacattgatcataaaatgatgaattgtattattaatcaatataatggaggccctgtgggactggatacgatagcagtgtcaattggagaagaacgtattacaatcgaagatgtctatgaaccctttttaatacaaaaaggatttatagaacgaacaccaagaggtagaaaagcaacaccatttgcctatgaacatttcaaaaaaactaaagaatgagggaataatatgaacgttgaggagtttgattatcatttacctgaatcattgattgctcagacacctttaaaaaatagagatcaaagtagattacttgtgctaggtagaaagaccggaaatattgcacataaacactttacagatattatggattattttgaaactggagatacattagtgttaaatgacacacgtgttatgccagcgcgtttattcggttttaaagaagaaacaggtgcaaaggtagaaatgttaatgcttactaggatagaggacaatgactgggaagtgttattaaaaccagcaaaacgtattaaagtaggtaatactttatcatttggtaacggcaaaatcattgctgaatgtataaaagaattagaacaaggtgggcgtattatgcgtctacattttgaaggtattttagaagaacgcttagatgagttaggtgaaatgcctttaccaccttatattaaagaacgtttagacgatccggatagatatcaaactgtatatgctaaagaaaatggttccgctgcagcgcctactgcagggttacattttacagatgagcttttacagaaaataaaagataaaggtgtcaatattgcatttattacactacacgttggcctaggtacctttagaccagtaagtgtggaggatattaatgatcatgaaatgcatagtgaatactatcaaatgactaaagaaacggcagatattctgaataaaactaaagaaaatgggcatagaattatttctgtaggtacaacgtctactagaacgttagaaaccattcgtcgtgatcatgaacaatttgttgccacaagtggttggacagatatatttatttatccaggttttgaatataaagcaattgatgggttaattactaattttcatttgcccaaatcaacattagtgatgttagtctctgcttttagtagtcgagaatatattttgaatgcttataaagaagcggtaaaacttaaatatagattctttagttttggagatgcaatgttaataatttaatgaatgagaggtacagattatgccagcagtaacttatgagcacattaaaacttgtaagcaatcaggtgcacgtttagggattattcatacaccccacggctcatttgagacacccatgtttatgccagtaggtacgaaagcaacagttaaaacaatgagtccagaagagttaagacaaattgaagctaaaattatattaggaaatacatatcatttgtggttacaacctggaaatgatattatcaaacaagctgggggcttacataagttcatgaattgggatggccctattcttacagattctggtggtttccaagtatttagcttgagtaatcttagaaaaatatcagaagagggtgtcgaatttagacatcatacaaatggctctaagttgtttttaagtccagaaaaatcaatgcaaattcaaaatgacttaggttcagatattatgatggcatttgatgagtgtccacctatgcctgccgaatataaatatgtaaaagattcaattgaacgtacaacgagatgggctaaacgatgtcttgaagcacatcaacgtccagaagaccaagcattatttggtattatacaaggtggagagtacaaagacttaagagaacaaagtgctaaagaacttgtatcattggattttcctggatatgctattggtggtttatctgtaggtgaaccaaaaccagtgatgtacgatatggttgaacatacggttcaatttatgccagaagataaaccaagatacttaatgggagtaggatcacctgatgccttaatagaatgtagcattcgcggcatggatatgtttgattgtgtgttgccaacacgcatagctagaaatggaacatgtatgacatctcaaggacgattggttataaaaaatgctaaatatgcagatgattttagtcctatagatgagaattgtgattgctatacttgtaagaattatacacgtgcatatattagacacctaattaaagcagaggaaacgtttggtatccgtcttactactattcataatttacattttctgctaaaattaatggaagatattagacaggccattcgagaagatcgtttattagattttaaagaagaatttttcgaacaatatgggctaaatgtagagaaccctaaaaacttttaataaggagaacaacataatgaatgtttcagcattaatcttgcctataattttaattatagtattttatttctttttaattagaccgcaacaaaaacgtgcgaaagaacatcgtgaaatgattagtcgtatcgaagcaggtcaaaaaattacaactattggtggaatcaaaggaacagttaaagctgtggatgaaacagcagttgtaatcacagtaaatggtcatggtactgaaatgacatttgaaaaacctgcgattaaacaagttgatccatcataaattataataaaaagacattccacgacagtttgttgtcatggaatgtctttttattaactatttatcttgattacactaataaagaggttatgttaagatagataagtcttgtcacatagatgtaatctttaattcacttgcacatggtttattaaaagattattctaattacataagtaaataatgaggtgttcatgtgaaaaaaacaagtagaataattgcattcatactcattgtagcgctactgattgtaggtatgggctttacatataagaatgtagttaagaatgtaaatctaggtttggatttacaaggtggtttcgaagtattatatcaagttaaaccacttagcggtgatggtaaaatcgatgataaggctttacaatctactgctcaaactttagaaaatcgtgttaatgtattaggtgtatctgagcctcatattcaagttgaagaccctgatagaattagggtacaactcgcaggggtaaaaaatcctgatgaagctcgaaaaattttgtcctcacaagcaaatctgactatacgtgatgctgatgaccacgttaaattaacaggtaaagatattgtacaaggttctgcaaaacaagaatttaaacaaggtacaaacgaacctgcagtcacttttaaattaaaagaccgtgcgaaattcaaaaaagttacagaagaaatttctaaaaaacaagaaaatatgatggtagtgtggttagactataaaaaaggtgatagctatcataaagagttggaaaaacctgaagataaacggaaatacgtttcagccgcttcagtagatcaacccattaattcagacagtgtagaaatttcaggtggcttccagggtcaacaaggcgtagaacgtgctaagcaaattgcagaattattaaatgcaggttcattaccagttgatttaaaagaaatttattctaattctgtaggtgcacaatttggtcaagatgcattagataaaacaatctttgcatcaatggttggtgttgcaattatctatttatttatggtaggtttttacagattaccaggtattgtagcagtgatagctttaacagtatatgtttatttaacattagtagcatttaactttatttcaggtgtacttacattaccaggtttagctgcattagtattaggtgttggtatggctgtagatgcaaacatcatcatgtatgaacggattaaagatgaacttagagtaggacgaacgcttaaacaggcttattctaaagcaaataaaagttctttcttaacgatttttgattcaaacttaacaacggttatagcagcagcagtattattcttctttggtcaaagttcagttaaaggatttgctacgatgttattattaggtattttaatgatattcatcacagctgtcttcttatcaagaggactattatcacttttagtttcttctaattactttaagaagaaatattggatgtttggtgtaaataaaaataatcgccatgatatcaatgaaggtgtagatgttcatgacttaaaaacagcttttgaaaaatggaattttgttaaattagcaaaaccattaattggagtaagtattttaattttagtaattggtataattattctaagtatatttaaacttaacttaggtattgatttctcatctggtacaagagtagatcttgattctgatacgaagttatctcaaacgaaagttgaacgtacgattaaagatgttggtttgacacctgatcaaattcaaattaatggtaatgacaataaacaagcaacagttcaatttaaaaatgatttatctaaagatgaaactttgaaacttaataaagttattaatgatcaatatggtcataaaccgacagtgaacacagtctctccaatgattggtcaagagttagctaaaaatgcaatgaaagcattaatttatgcagctattggtattattatctatgtttcattaagattcgaatggagaatggggctttctgctgtcttagcattacttcatgacgtatttattatcgttgctttattcagtttattaagacttgaagtagatattacatttatcgctgcaatcttaacgattgtaggttactcaataaatgatacaattgttactttcgaccgtgtaagagaaaatcttcataaaattaaagttataacagaacctcatcaaatcgatgatattgttaaccaatctattagacaaacgatgactcgttctgttaatacagttcttacagtcgttgtagtagttatcgccatactaatctttggtgcatcaagtctgtttaacttctcattagcattacttattggattattatctggtgtattctcttctatctttattgcagttccactatggggcatcatgaagaaacatcagttgaaaaaatctgaaaacggtaagcttgtagtttataaagagaaaaaatcaaatgatgaaaaaatcttagtataattaaatatatgatataaaattagtggaagaaacaaaagaattctaattgaattcagtgtttcttcctctttttatttattctttttttaggtataattgcttgtggaaaaaggaaggataactttatgattcaatctaaatataaatggctttatgaagcacctaaacaaaatatatcgtctgagattattaaggaatttaatttatctcctattgtaagaaagattttagaaagtaaatcgattacacagtacgatgagataaatacattaattaatggtacaaataaaaagcatgattcatggctaatgagtgatatgcaaaaagctgttgatcgaattaatttagcgattgataaaaatgaaagaatattagtatatggagactatgatgccgatggcgtaacatctacaacgatattagttcaaacactgcagaaattgggcgctgaagtcggttggtatattcctaatcgatttagcgaaggttatggcccaaataaatacgcctttcaaaatgcttacgatgaaggcgtatcacttattattacagttgacaatggaatacaaggtcatgaagaaattgaaatggtacaagcattaggagtcgatgtaattgttacagaccatcatgaaataggccgtacattaccaaaagcatatgccattattcatcctatgcatccagaatttgagtatccatttaaatatttatgtggagccggtgtcgcatacaaattatcgcaatgtttaatagatcatcctccagaatatttcatagttcttgcaactattgggacgattgcagatttagtgtcactgactgatgaaaacagaacgattgttcaagaaggtcttaaatatttaaatcaatcctgtccatttcaaattcaatcattattaaatcaagcaggatttaatgatgagatagatgaagaaacaattggtttcattattggacctcgtttaaatgcggtaggtagattagaagatgcgtcattagcagcggaattactgatggcagaagattctgaagaggcgaattttttagctgaacaagtagaggcatttaacattgaacgtaaagatattgtagctcaaataacagaagaagccctattgatggctaatgaaaaagttgaaaatggcgacaaatttttacttttagctaaagaaggatggcatgagggagtattaggtattgtggcttcaaaaattgtagaaacttatgctttacccactcttattttaaatatagatttagaacaacatcatgcaaaaggttcagctagaagtattgaacaagtgtccatgttcgaaattttaagtgcacatcaagatttgatatctaaatttggtggtcatcatatggcagctggaatgacgatggagattgataatattgatgcattatcaaaaggactaaatgagtggatggttcagctttctaaacatacttctttagaaccaacaaaacatattacgactaaactttcagaagatgacattactgtatcaaatattcatgatattaaaatactgaaaccgtttggtactgattttgaaaaacctttatttgaattggatgatacagaagttaatgatgttaaagcgattggaaaagataaaaatcatttaaaattagtaactggtcaagctaagttacaacatttattttggaaaaatggtggtttaattacacaaatagaattaggccaacccgtcaatatcataggacatttacaaataaatgagtggaatggcaatcagacacctcaaatgatgatacaagatttagcgactcaaaatgagcaaatattagattatagaagtaaacgtaaacaacttaacattgatacgtcatctaaaaatgttgcttttgtcattcattctaaaaaagagaagctaggggagaattatttccactacggtgaaacaattgattcatcatataatacgattgtatttcgtgatttaccaactgatttagatagtgttaaacaatctctaaaacatttagaatactcacaactctatttagtattacaccatcaacattcaatttatttcgaggggttaccgagtagtcatctatttaaacaaagttataaggcactattcattaggaaagaaatgaatttagaaaaagaaggtttacaattatgtcaatacttaaatattaagccaaatactttaaagtttattttaaaagtatttcttgacctaagttttatttacgaagaaaatggtataattaaaataaatgataatccaagtaaacaatctattgagtcgagtcaagtttataaatcgagacagtcaagaattgaagttgaaaaattaatgctttatgatgacttttcacatcttaagaattggattaaagctcaaaaagcgtaacgcataggaggaaatttttaaatggatttaaagcaatacgtatctgaagtacaaggctggcctaaaccaggtgttagtttcaaagatattacaactattatggataatggtgaagcatacggttatgcaactgatcaaattgtaaagtatgcaaaagatcgtaacgttgatattgttgtaggccctgaagcaagaggatttattattggctgtccagttgcgtactcaatgggaattggatttgcacctgtaagaaaagaaggaaaattaccacgtgaagttattcgctatgaatacgacttagaatatgggacaaatgttttaacaatgcataaagatgcaattaaaccaggacaacgtgttttaatcactgatgatttattagcgacaggtggaacaattgaagcggctattaaattagtagaaaaattaggtggtattgttgttggaatagcttttattattgaattaaaatatttaaatggtatggaaaaaattaaagactatgatgtcatgagtttaatttcttacgatgaatagtcattaatttagtaattagattaatatatactttaaagcgagtgtaggaattcagattgaatactatctcgcttttttatttatcgttgtatcatcattaatctaatcacatttatttatttaaaaacttgtagtattatataactattatttaaaccaaagttaatcttttagagattttaatacttttgttaaaattacattaatactcacgcatctttaattaataggagtggtactcggattaattaagtaatgaaaagaaatttcttgattttcaatgattcggttatcggtagagtatttgaaatattaaaaagtcggggtgtcatatattgaataacgagtatccatatagtgctgatgaagtactaaataaagctaaatcctatttatcagcagatgattatcaatatgttttaaaaagttatcatattgcttatgaagcacatcaaggacagtttcgaaaaaatgggctaccatatattatgcatccaattcaagtagcaggtatattaacagaaatgcgcttagatggaccaacaattgtagctggctttttacacgatgtgatagaggatacaccatatacatttgaagacgtaaagaatatgtttaatgaagaaattgcacgaattgtagatggtgtaacgaagttaaaaaaagttaaataccgttctaaagaggaacaacaagcggaaaatcatagaaagttatttattgcgatagctaaggatgttcgtgtcatattagttaaattagctgaccgcttacataatatgagaacgttaaaagcaatggctagagaaaaacaaattcgtatttccaaagaaacattagaaatctatgcacctttagcgcatcgtctaggtattaataccattaaatgggaattggaagatattgcgttacgttatattgatagtgttcagtattttagaattgttaatttaatgaagaaaaaacgcagtgaacgtgaagcatatattcaaaatgctatggataaaattcaaactgaaatgaataaaatgaatatccaaggtgaaataagcggtcgccctaaacatatttacagtatttatcgtaagatggtaaaacaaaaaaaacaatttgatcaaatatttgatttattagctatacgagtgattgtgaattcaattaatgattgttatgctattttaggcctagttcatacattatggaaaccgatgccaggtcgttttaaagattatatcgctatgccaaagcaaaatatgtatcaatcattacacactactgttgttggacctaatggtgatcctttagaaattcaaattcgaacatttgaaatgcacgaaattgctgagcatggggtggcagcgcattgggcatataaagaaggtaaaacaataaattctaaaacacaagatttccaaaataaacttaactggttaaaagagcttgcagaaactgaccatacatcttcagatgcacaagaatttatggaatcacttaaatatgatttacaaagtgataaagtatatgcatttacgccagcaagtgatgtgattgaattaccttatggcgcagtccctattgattttgcttatgccattcatagcgaagttggtaataaaatgattggcgcaaaagttaatggtaaaattgtgcctatagattatatacttaagacaggcgatattatagaaattcgcacaagtaaacattcatatggtccaagtagagattggttgaaaattgttaaatcatctggagcaaaaagtaaaataaaaagtttctttaaaaagcaagatcgttcttctaatatagaaaaaggtaaatttatggtagaagcggaaattaaagaacaaggttatcgagttgatgagattctaacagaaaaaaatattgaagtcgttaacgaaaaatatcattttgccaatgatgatgatttatatgctgcagtaggttttggtggagttactgcattacaagtagtgaataaattaacagaaagacagcgtatacaagataaacaaaaagcattaaatgaagcacaagaagtcattaaaacatcaccaattaaagaagatatcattactgatagcggggtttatgtcgaaggattagaaaatgttttaatcaaactatctaaatgttgtaatccaattcctggtgatgatattgttggatacatcactaaaggacatggtattaaagttcatagatcagattgcccaaatattaaaaatgaaaacgagagattaattaatgtcgaatgggttaaatcaaaagattcaacacaacgttatcaagtagatttagaagtcaatgcatatgatcgaaatgggttactcaatgaagtgattcaagccgtaaattcaaccgtaggaagtattattaaaatgaatgcacgatctgatattgacaagaatgcaatcattacaattagcgttatggttaaaaatgtaaatgatgtatttcgtgtagttgaaaaacttaaacaattgagtgatatttatacagtttctagagtatggaattaaaagaggtgctaagatatgaaaatagttgtacaaagagtaaaacgagcatctgtcactaataaatctattcaaaaccaaattgaaaaaggttattgtttattagtaggtgttgggaaaaattcgacggaagctgatatagaagtattagcgaagaaaattgttaacgcacgtttgtttgaagatgataacgggaaattaaatttaaatattcaacaaattaatggtgcgattttatctatttctcaatttacactttatgcagaagttaaaaaaggtaatagaccaggtttctcacaatccatgcgacctgaagatgccaaaatattatacgataagtttaactctgaacttcaaaagtatgatattgatattcaaactggtgaatttgggacagatatggaagtagaaattattaatgatggtcccgtaacgattatatatgaaagtcaggatggcaaagtaatatgaataaattagatacatggttaactaaacatgatctaaaaaatatgttgacgttagtagtagtgttattatttattctttttataatattattatttatgtttatgaatcataatgatcaagatagtaatagactaacaataacggaagatgcagaaataagaacaggtcctaatgcaggctatccggtgatatataaagttgaaaaaggagatagttttaaaaaattaaagactacaggaaaatggattgaagtccaaaatgctaaaggagataaaaaagggtgggttgctggttggcatacgagtttgaatattaaagctgatgtcaataaacaggaaaatccttttaagaataaaactgtggtacttgatcctggtcatggaggtagtgatcagggagcctcaagctccacggctcttaaatctctcgaaaaaaactatactttgaaaacagcacttgaattaaaacgggcattagaaaaagcaggagcgcatgttaaattgacgagaacagatgatagttatgtaagcttagataatagaaaagcgacaggcgatgtatttataagtattcataatgactcattagatagtcataatgctaatggcgctactgtatattggtatcaaaatagtcaagaaacattagcagaaatattaaatgcgaatattcaaaaaaagtcattactttctaatcgtggtgttcgtcaacaaaattatcaagttttaagacaaacgaataaaccagctgtgttacttgaattaggctatataagtaatcctactgatgaaaaaatgattagaaatcaattacatagacaggtggtagaagaagcagtcgtagatggattaaagcaatattttgcttcataatacttgcaaacttttcctaaaatcggtatcataatcagtgaactttataaataataccgtttgtattcttgaaaagactaatgaaatagtggacaatcataatgattgtgaagagaagtaatcctaggctgaaagattatactagtacattggtatctttgaacacaagaaaaggtgctttgataaaataaagccggtttgcgtacgttacacgtgatgagtggagaatatttttattctcaattagggtggcaacacggcatatcgtcccttatatagcatgaagctatataagggacttttttattaaagaattttaatagttaacaacaatttagaaggagtgattgtatgattaagattcctagaggaacgcaagatattttacctcaagagtctgcaaaatggcgatatattgaaaataaattagatgaattaatgaaattatacaattataaagagatacgtaccccaatatttgaaagtactgacttatttgcaagaggtgtaggagattctactgatgtcgttcaaaaagagatgtatacgtttaaagacaaaggcgatagaagtatcacattaagacctgaaggaactgcagcagtagtgcgatcatatattgaaaataaaatgcagggtgaacctaatcaacctattaagctttactataatggaccaatgtttagatacgaacgaaaacaaaaaggacgttatcgacaatttaatcaatttggtgtagaagcaataggagcagaaaatccaagtattgatgcagaagtattagcaatggtaatgcatatatatgaatcatttggtttaaaacatctaaaactagtgattaatagtataggagaccaagcatctcgtaaagaatataatgaagcattaattaagcattttgaacctgtcattgatacattttgtaatgattgtcaatcacgtttgcatacaaacccaatgagaatcttagattgtaagattgatagagacaaagaagccgttaaacatgctccaagaattacagattacttaaatgatgaatcaaaggcttattatgaagcggttaaacatcatttagatcaactagatatcaattatgttgaagatcctaatttagtgcgtggacttgattattatactcatacagcatttgaactcatgatggataatccaaattatgacggtgctattactacgctatgtgggggaggtcgttataatggacttcttgagttattagatggtcctaagcaaacaggaataggttttgcccttagtattgaacgattacttcttgcacttgaagaagaagacatagaattgaatgtggatgaagatttcgatttatttgtcgtaacgatgggtaaaaaagctgaacaatatagtgtgaaacttttaaatgatttaagaaaacatggcgtgaaagctgataaagattacttaaatcgaaaaattaagggacaaatgaagcaagctgatcgtttaaatgctagatatacgattgtaataggtgaccaagagctagacaataataaaattgatgttaaagaaatgtctacgggtgaaacaaaaacaattcaattagatgaagtagttagtttctttaataaagaaaaggagaataaataatgggtaaaagaacaacatactgtggtttagtaactgaagaattattaggtcagaaagtaacactaaaaggttgggttcacaaccgacgtgatttaggtggccttatttttgttgatttacgtgatagagaaggaattgtacaaattgtattcaatccagatttttcaaaagaagctctatctattgctgaaactgtaagatcagaatatgtggtcgaagttgaaggttcagtcactaaaagagacccagaaacagttaatccaaaaataaaaacgggtcaagtagaagttcaagtatctaatattcatataattaataaatcagcgacacctccattttcaattaatgaagaaaatcaaagtgttgatgaaaatattcgtcttaaatatcgctatttagatttaagacgaccagaattagctcaaacatttaaaatgagacatcaaacaactcgatcaattcgtcaatatcttgataataatggtttctttgatattgaaacacccgtattaacaaaatctacaccagaaggtgcgagagactatttagtgccatctcgtgtacatgaaggcgaattttacgctttaccacaatcaccacaattatttaaacaattattaatgattagtggttttgataaatactatcaaattgtaaaatgtttccgtgatgaggatttacgtgctgatcgtcaacctgaatttacacaagtagatatcgaaatgagttttgttgatcaagaagatattattcaaatgggcgaggaaatgctttctaaagttgtaaaagatgtaaaaggtattgatatccaaacaccattccctcgtatgacatatgatgaagcaatgaaacgatatggttctgataaaccagatacacgttttggtatggaattgcaagatgtgtctcaattaggaaaagaaatggatttcaaagtatttaaagatactgtagaacacgatggagaagttaaagcaatcgttgctgaaggtgctgcagataactatacacgtaaagatatggatggattaacagaatttgtaaatatctatggtgctaagggtctagcttgggtgaaagttgtagatgaaggcttaagtggtccgatagcaagattctttgaagaagagaatgttaacacattaaaagaattaacaggtgctaaacctggagatttagtaatgtttgttgcagataagccaaatgttgtggcacaaagtttaggtgcacttcgaattaaaattgcaaaagagttaaaattaattgatgaatcaaaattaaacttcttatgggtaacagattggcctttattagaatatgatgaagatgctaaacgttatgttgctgcgcatcatccgtttacatcacctaaagatgaagatattgctaaactagactctgaaccagaaaaagttcaagcaaatgcttatgacgtagtattaaatggatacgaattaggcggtggatcaatcagaatatctgacggagaattacaagaaaaaatgtttgaagttttaggatttactaaagaacaagctagagatcaatttggtttcttattagatgcctttaaatacggtgcaccaccacatggaggcattgctttaggtctagatagattagttatgttacttacaaatagaactaatttacgtgataccatcgctttccctaaaactgcttctgcaacttgcttattaacggatgcaccaagtgaagtatcagataaacaattagaagaattatcgttaagaattcgtcattaatcttcatttttaaaatagaataatttagtgctaaattgggacggaaattgaatttctgttccaatttttttataaactaacttaaattttaaataacaataattatattatgtaaacctatgtatttaaagatattttatattttaaaatatcttcatacagtatttaaggatttatttaataatctctttatgataaaatatgtctataagatagtcatctgtgttgttcgtatgtttgctttttatttgggcctaacactttttgatcagggagcccaataggttttcttgcagcgcacatgcctcatttggaggacttgcaaaacaagaaacagggcacccacctgtatatagcaggccgaatgatcaagctttttataactacggcaactacggactctatcggtacgtaaggctttaggccttacgtatttttttttgcttttttctgttaatatagtattaatatttgctaagtaaaggagttaattatgaaacatcaattttctagaaatgaattagcctatggacaagaaggactagatttactaaaagacaaaacagtagcggtcttaggggtaggtggagttggttcatttgctgctgaagctttagcaagaactaacattggtcacattattcttattgataaagatgacgtagatatcactaatgtaaaccgtcaaattcatgcattaactactaccataggtcaaagtaaagtaacattaatggaagaacgaattaaactcatcaatccaaattgtaaagttacacctcttcacatgttttatactgaagagacatatgaagatatttttaataattacaatattgattattttatcgatgcaagtgacacgattatatacaaagttcatttaatgaaagaatgtttagatagaggaatcaagttgatttcaagtatgggcgctgcgaataaaatagatccaacacgtttcaaaattgctgatatttcaaaaacatacatggatccaatggcaaaaattattcgtaacaagttgaaaaaacttggaataaaaaaaggtgttcctgttgttttttcagatgagagtccaatagttattcgtgaagatgttaagaaaacagttggagatgcaaatgcaataaatcgaaaaggtcaaatgcctccatcatcgaatgcatttgtaccaagcacagtaggtttaatttgtgcaagttatgtcgtaaatgatattttaaaagatattcctgtacgtagaattaaagataaaggtaacaactaacaaaaaacctatggaagagatgaatgaagtattatcatcttttccataggttttattagtttttatgatttaaattatcatacactattttaaattgttgttcacttttagacgttgtttttggttcataatatattttattttttaaagcgtcaggtaaatattgctgtttaatataaccattctcataatcatgaggatatttataaccgatagatcggcctaagtcttttgctccttgatagtgaccatcacgtagatgattaggtatttgtccaactttgccttttctgatatcacttaatgcactatcaattgcttttatagctgaattagacttaggagatagtgataattcaattactgcttgacttagaggaattcgtgcttcaggcaatccgagtcgttcagctgattgaatagctgctagtgttctttgaccagcacttggagaagctaagccaatatcttcataactaatgacgagtaaacgtcgtacgattgttggaagatcacctgcttcgattaatctcgccaaataatgtaaagcagcattaacgtcacttccacgaatagacttttgaaatgcactcatgacatcataatgcatgtcgccatctttatcactgataaaagcacctttttgtaaacaatctttagcatcttctaaagtaacatgacgttgattattggaaactttagcacttaatactgctaattccaaagcatttaaagcgcttcttacatcaccatgactttgagtagagaaatattttagtgcatctttatcaatttttggttgatacgattttaaaccattttgatcatcatttaatgctctagttaatgcttgatatacatccttttcatcaagtggatataattcaaaaatttgtacacgtgagcgaatcgctggattaattgcatgataagggttagaagttgtagcaccaattaaaatgattttaccattttctaaatgtggtaataaaaaatcctgttttgctttatctaagcggtgaatctcatctaataataaaatgacttgtcctgacattttagcttcttcaactatcatttgcatatctttttttgtattcgttactgcatttaattgtctaaatttatattcagtactgccagcaatggctttagcaatactagtttttccaattccaggaggtccataaaaaatcatagaagataattttttagtttctaccatacgtcttataatgcctcttggaccaactagatgttgttgtgaaataatttcatttatatttgtaggcctcattcttgaagctaaaggttctgtattcaattttttcacacctttctattactatattaactgaaaaaatgatagaatgggactatattattcgaattaagtgaggtaaaactatgaaaatatcaacgaaagggagatatgggttaactttaatgatttccctagcaaaaagagaggggcaagggtgtgtatcattaaaaacaattgctgaagaaaatcatttaagtgatttatatttagaacaactcgtgggtcctttaagaaatgctggattaattcgaagtattcgtggcgctaagggtggatatcaattaagagtcccatctgaagaaatttcagctggcgatattattcgcttattagaaggacctattactattgtagaaagtatagattctgaaccaccagcacaaaaagaattatggttgcgaatgagagatgctgttagagaagttttagataatacaacattaaaatatttagctgattttgtagaatcagataacgatttagatggttatatgttttacatttaaaaatttaaattaattatgtttaaaacttttttactgtggtattggattaaagtaagtaaaaattacttattaaaaattaaatgcttaaattcgaaaggagaatttcaatatgggattcatggataaagcaaaagatgcagcagagaaatttgaaaatagcgataacgaacaagtaaataaagtaaaagataaaattaatgaatatactggtggaaataacgacagtaaagatgacaaaaaagacaataaataattaaaattgtgagtgatgattttagtcatcactctttttttatgaaaaatttaaaacctgttgacaatttatttatgttcaacaggttttaatcaatattatttatttaatttttgaattactcgtttaaaacgctcatatgattcaaattgtctatcttggtcataaatatagcttacggccattatttcatcaatatcaccatattcctctaaaaatgcttctaatttagcttttacagtttcttcagaaccaataagagaatcatcaaatctttgttttgccatttcatactctctcggtgttaaaagaccttttaaatcatcagttggtggttgaactggttgcattcttcctcgagcaatactaatgaatacttgtgctaaagaactagctaaatattctgcttctttatcagtttctgtcacgatagcatttaaacatacaatcatatatggtttatctaatgcttcagatggttcaaataagtcgtgataaatttcaattgcttctttcatttgctgtggtgcaaaatgacctgcaaaaacatagggtagaccttttctagctgctaaatgtgcagagtcagttgatgatccgagtatatataacggtacatttttatctaccgcaggataagcccttacataagcttgtttatttcctggaccaaaataagtttgtaattgttctacttcttcagggaaagcatacacaccattatgttgatctcgtctcaatgcacttgctgtcatcatatcagtaccaggtgctctacctaatcctaaatctacacgattgggataaatggtttctaaggtgccaaattgctcagcaacaactaaaggtgcatggtttggaagcatgatgccacctgaaccaactttaatattatgagtatgttcaagtgtatgttgtattaacaatgatgtagctgagcttactaaattaggtgcattatgatgttctgcaatccaataacgctcataatctaattcatctaatttctgagctaaagccaccatatcattaattgcatctttatcagtttgaccttctcgtataggaactaaatttaatgcagaaaattttatatcagacatagactatttctcctttttatctttattatctaatagtttaacaacttaaaacaattacagttattaaattgctcatacttaaaatgattattgaaagaaaaatagttaatatattaattcataaacaagaaggtagaaaattttagaatgaggtgctattataggaacattgataatattgtgaggagtgtacttaataatggaagtatacgcagattatgctgcaactacaccagtcaaaccagaagttatagaagcaatgatggatatgtatcaatcacactacggcaatccatcttctattcactcagtaggtagagatgctagacgctatttagatgaatctagaagaaatgttgctcaattactaggtgctaaaccaagcgaaattatttttactagtggtgctacagaatcaaataatactgctattaaagggttagtctatgctaatgagcatttaggtaatcatattattactacaaaaattgaacatcattctgtattacacgtattcgagcaattagagaaagaaggatatgaagtcacatatttagatgtagatgatacaggtagagttgatttggatcaattggaagaatctttaacagatgatactatcttagtatctattatgtttgtcaataatgaagtgggcacagtagaacctatttacgatatcgaaaacattgtttctaattcaaatgctctattacatgtagatgcagtccaagcaattagccatttagatattaaatttagtgagtttaatattgataccatgagtattactgctcataaatttggcggacctaaaggtgtaggcattttattagtaaaaaacaatacaccaatcgagtattctcaattaggcggcgaacaagaaactaaacgtcgtgctggaacggaaagtgttccacaaatagttggaatgaccaaagctctagaaatagctactaaaaatcgagatcaaaataatattcatttaatgcaattaaaagaactttttttagtaagtttgcaagaacgtgcaattccatttgaagtcaatggttccatggtagaaacgactggccatatacttaatttatatcttccatttatagatgtagaaacaatgttaactttattggatttggcaaatatttatgtttcgtctggttctgcatgtacagctggttcaacaactccgtcacatgtacttgctgctatgtatgaagatgaagatcgtgcaaaacattcagttagatttagttttaatgaaatcacaaccgaacaagatataaagtatattgttgctgaaattcataaaatatatcataaatttaaggaggaatagaacttgtcaaataaagatatacgtgttgtagttggtatgtctggaggtgtagatagttcagtcacagcatatcttttaaaggaacaaggatatgatgtcattggcattttcatgaaaaactgggacgatacagatgaaaatggtgtatgtacagctacagaagattataatgatgttatagcagtatgtaatcaaattggtataccatattatgctgtgaattttgaaaaagaatattgggataaagtattcacatatttcttagatgaatataaaaaaggtcgtactcctaatccagacgtcatgtgtaataaagaaattaaattcaaagcatttttagaacatgcattaaaattaggagccgattatgtggctactggtcattatgcacgaatccatagacatgaagatggtcacgtagaaatgttacgtggggtagataataataaggatcaaacatactttttaaatcaattatctcaagaacaattatctaaagtcatgtttcctattggagacatagaaaaaaaagacgttcgtaaaatcgctgaagaacaagacttagcaacagctaagaaaaaagattctacgggtatttgttttattggggaacgtaattttaaatcattcctttctcaatatttaccggcacaatctggtgagatgagaacactcaatggtaaaaaaatgggcatacacagtggtttaatgtactatactattggccaacgtcatggactaggtattggtggagatggagatccatggtttgttgttggtaaaaatcttgaagataatattttatatgtcgagcaaggcttccatcatgatgcattatatagtgattatttaattgcttctgacgcatcatttgttaatccagttgatttagaaaatggatttgaatgtactgctaaatttagatatcgtcaaaaagacactaaagtatttgttcaaaaagaagatgaacaatctattcgagttactttcgacgaacctgttcgagctattacaccaggccaagcagtggtattctataacggagaagtttgtttaggtggcgctactatagatgatgtatataaaacaacaggtcaacttagctatgttgtttaatgtttagtaaaccgttaactcattgtaaatgagaattagcggtttctttttaattgtaaatttatgttagaaatggagacatggaaatgattgaacaagaaacaatatatcagtggatgaataatggtaattatgaagaagccattaaagcattatttaataatattgaagagaatcctaatattattgaaaattatattaatgctggtatcgttttagctgatgttggtgagattgagaaagcagaaagattttttcaaaaagcaataacattagatgacaaaaatggcgctgtttactataatttagctaatctatattatgaacaatcgcgttttcaagaagcgataaaactttatcaacgagctttaaaatataatatgaatcccgttgatgctaattatatgattggtatgtcttttagccaactagatgcgcaaagagaagcattacccttttttatgactgctgctgaattagatcaaactttggacacagaagttcaatttcaatatggtttaacattatgtcatttagaaatgtttcaagaagccattaagcaattaaattatgttttatctattaattctaatcacgtagatgcattatataatttaggtcttgcaacatatatggaaactgaggatgctgataaagcaattcagtattttgataaagcaattcaaattgatcctaaacatttattaagtcagcatgctaaacaaacatttaaatctctaaaaaatgaggaggaataatatgtcaaaccctacactatttgattactcaatggttaaaggaacagttgataccattctatttcaaaataaagataacttttatactgttttaaaagtagattccattgaaactaatgaatcatttgataatctgcctacagttgtagggttttttcctaatattgttgaaggagatgtctatacgtttaaaggacaaattgttcaacatcctcgttatggtaaacaacttaaagctgaaacatttgaaaaagaattgcctcaaactaaagatgccattataagttatttatctagtgacttatttaaaggtattggtaaaaagactgctcagaatattgtaaatacattaggagaaaatgcaataaatgatattttaactgatccttctgttcttgaaaatgttcctagtttagcaaaaacgaaacaaaaacagattgtagaacagattagtgcaaatcaagagtcagaaaaaataatgattcgcttacatgacttaggttttggtccaaaattatctatggcgatttatcaattctatcaatcagagactttaaaagttttagaaaacaatccataccaattagtttatgatgtaaaaggtattggttttcaaaaagctgatacattagctagaaataatggtattgcttataacgattcagaacgtttaaaagctggattattatatactcttgaagaagaatgtataaaacaggggcatacttatttagatgaaaatgctgtattagaaattacagaagatatgctttcagataagcatttagatgaaacaattgaacaacaacaattaaaacatgtactacaaacactttttgaagaaaagaaaattattttagagaatagtcatgttgcgattccaagtttatactattcagaacttaaaagtgttcaaaatttgtatcgtatcaacacatacaaaaatcactttaaaataatagagcaatcagatttacagatacatattggtgaactagaagatcaaaataatgttaattatgctaaatcacaacaagaagcacttgaaacggcgatgaattcgaaaataatgttactgactggagggccaggaacaggtaagacaactgttattaaagggattgtagaattatatgctgaaattcatggtctatctcttaagtattctgattatcaagaagatgattatccaatcgtattagccgccccaactggaagagcatcaaagcgtttacaagaatcaactggcttagaggcaatgacgattcatcgattaataggatggaatcaagatactcaaccagaagatattcttgagaatgaaattaaagctaagctcattataattgatgaaatgtcaatggttgattcttggttgttccaccaatttttaagtgccgttccactagatgcacaaatcattctagtaggggatgaagatcaattgccatctgtcggtcctggccaagtatttaaggatttaattgagtctaaagcatttccaagagttaatttaactgaagtttatcgccaacaagatggttctagcattattgacttagcgcatcgcatgaaacatcatgagccaatagatattacaaaacgttatcatgatagaagttttattcattgcaatgtagaacaaattccaactgtagtggagaaagtagtatctagcgctgtaaataaaggatatgatatgagtgatattcaagttttagcacctatgtacaaaggaagtgcagggataaaaagacttaatcaagtattacaaaatattttaaatcctaaagaaaaagatacaagagaaataaagtttggcgatataacgtttagaaaaggagacaaagttttacaactagtcaatcgaccaaatgataacatttttaatggtgatattggagtcatagtaggtatattctgggctaaagaaaatgcacttaacaaagatgtactgattatcgattttgaagggaatgaaattacatttactagacaagatttattagaactcacacatgcttattgtacctcaatccataaatcacaagggtcagaatttcctattgtcattatgcctattgtcaaacaatattttagaatgttgcaaagacctattttatatacaggtctgacacgtgcaaaacaatctttagtactattaggcgatccaaaggcatttgacattgccttaaatacgcaaggtcaagaaagacatacacaattaaaaacactaattataaattattttggtatgagtcaggttaatatagatgtagaagagaatgatgaacagataaatatagatgataaagatgataataatgcagttgaacacattactttaagtgaagaaacaatttatcaaattaatccaatgattaatatgggaaatgtttcaccttacgactttgttgaacattgacaatttaaacaaaaatacttaaaataaatttgaattcgcataaagatgagtaaactttttaacttatgtagagatgtactggttggtgaaaagtacaagttaatttgttgaacgctactttgtgttatcgtttatatgataattaagtgatgagaaattaaatatatttcaaaagtatttatttcttgtaactagggtggtaccgcgaaaacgttcgtccctttgttggatgaacgtttttttatttataaatgtattaattatattaggagtgaaaaaatgaaaaaacttaaagcaagtgatatacgtcaaaaatatattgatttctttgttgaaaaaggtcatatggtagaaccatctgcaccacttgtgcctattgacgatgattcgttactttggataaactctggtgttgcaactttaaaaaaatactttgatggacgagaaacacctaaaaagcctagaatagttaattctcaaaaagcaattagaacaaatgatattgaaaacgtaggttttactgcgcgtcatcatactttctttgaaatgcttggaaacttctcaattggtgactattttaaaaaagaagcaattgaatttgcttgggaatttttaactagtgacaaatggatgggaatggaaccagaaaagctatatgtaacaattcatccagaagatgttgaagcctatcgtttatggcatgaaaatattggcttagaagaaagtcgtattattagaattgaggggaatttctgggatattggagaaggaccatcaggacctaacaccgaaattttctatgatcgtggtgaagcatatggtcaaaatgatccagcagaagaaatgtatcctggcggtgaaaatgagagatatttagaagtatggaacttagtgtttagtgaatataaccataataaggatcatacttatacaccacttccaaacaaaaatattgataccggcatgggattagaacgcatgacgtctatttcccaaaatgttcgtaccaattatgaaacagatttatttatgccaattattgaagaagtagagcatatatcaggaaaaaaatatcttgaaaataacgaacaagatgtagcatttaaagtcatcgccgaccatatcagaacaatctcattcgcaatctctgacggcgctttacctgcaaatgaagggcgtggttatgttttacgtcgtctcttacgtcgtgccgtacgttttagtcaaacgcttggcattaatgagccatttatgtataaattggttgatatcgttgctgacattatggagccatattatccaaatgtaaaagaaaaatcagattttattaaacgtgttattaaatctgaagaagaacgtttccatgaaacacttcaagaaggcgtatctatattaaatcaactcattacgcaagcaaaagaatctacacatcagattaatggttctgatgcgtttaaattatatgatacgtatggattcccaattgagttaactgaagaactagcaagtcaagaaggtattacagtcgacatggcaacatttgaagctgaaatggaacagcaacgtactagagcgagagaagctagacaaagttcacaatctatgcaagttcaaagcgatgttttaaaaaatattaatactaaaagccaatttgttggttatgaaacaacagattatcaaacaattttaacagatttaatttataacggtaaaactgttacatctgctgaagctggagaaacagtttactttatcttaaaagaaacaccattttatgcagtaagtggtggacaagttgcagataaaggaactgtaggaaatgatcagttcgaaatagccgttcaagaagttacaaaggcaccaaacggacaaaatttacaccaaggtatagttcaatttggacaagtaagtgtaaatagtcatgtagatgcaactgtaaataaagaagaacgtaaagatatacaaaaaaatcatagtgccactcacttactacatgctgcattaaaagagattttaggtgaacatgttaatcaggcgggttcactcgttgaaagtgaacgattaagatttgacttttctcactttggtccaatgacagaagaagagattgatcaagttgaaagaagagtaaatgaagaaatttggagaggaatttcagttcatattcaagaaatgcctattcaagaagctaaagaaatgggtgctatggctctgtttggtgaaaaatacggtgatattgtaagagtagtcaatatggctccattttcaattgaattatgtggtggtattcatgtagataatacggctgaaatagggttgtttaaaattgtaagcgaatcaggtacaggtgcaggtgttagacgtattgaggcacttaccggtaaagccgcatttttatattttgaagatattcaaaataaatttaattctgtcaaagaacaacttaaagtaaaatcagataaacaagtttatgataaagttgttcaaattcaagaaaatgaaaaacaattgaataagcaattagagcaacgtaataaggaaattacttcacttaaaatgggtaatatagaggatcaagtagaaatgattaatggatttaaagtattagctacagaggtagaagtatctaatccaaaagaaatccgtcaaacaatggatgattttaaatcaaaaaaacaagatacaattattattttagcaggtcatgttggtgaaaaagtttcgttaattgccgctgtacctaaagagcttacaagtcaggttaaagccggagatatcattaaaaacatggctccaattgtaggaggaaaaggtggcggtcgtccagatatggcacaaggtggcggcacacaacctgaaaacatctcagaatcattacgctttattaaagattatattaaaaacctataactttttaatcaactggtgtaaaattaatatgtaagttaatacatgtcagaggagtgtcgcatctatggaaaatattgataaaactatgaaattcgattatgatgaaattccaaaagaaaatgtccaaacagttttaaaaaatgtacatcagactctagaagaacgaggctacaatgctgtaaatcaaattgtcggctatttactttcaggagatcctgcatacattcctcgtcaaaatgatgcacgtaatcaaatacgacacattgatagagatgtaattatggaagaactcgtttcaaactacttaaaagagaataataaataaatgttacgtcataaaattttaggattagatgtaggtagtagaactgtaggtatcgcaattagtgatttgatgggctggactgctcaaggactagacactctaagaataaatgaagaaaatgaagaatttggtattgatagattggtttcaatcataaaagacaataatgttggttcagtagtcataggattaccgaaaaacatgaataattctattggttttcgtggagaagcttcccttaaatacaaagaattacttcaagaggctttaccaaatattgaaattattatgtgggatgaacgtttaagtaccatggctgctgagcgctcattattagaagctgatgtctcaagacaaaaaagaaaaaaagtaattgataaaatggcagcagtttttatactgcaaggctatttagattcaattcaataaaggagaatttcattatgactgaacataatcataatacagaattaaatattagtaatgaagaagaattattaacgttattcgatgaaaatggaaatgaagttttatatcgaaaaatgcttgaattttatcatccagaatttaaaaaagagtatgttattttagctgaagaaggtgctcaatctgatgatgatgacatgattgagctcattccaatgattaatgaaccagatgaatctggtgatggtggtaaacttgttcctattgaaacagatgaagaatgggatatgattgaagaagttgtaaatacaaatatggaagaataaacagtcttttgttaataataaatctctaatcaattcactttggttagaggtttttaatatttcaggcttaaatttaatttagaattatgataaaatatttaaagttaaattactgtagcataaatttttaaatatacagtcagttactatatttatacattaaaacataaagtaggtttattattttattttaaataatgtaatattagttgactgatttatttttatgcctattgatattaaaagggaagttatagaagtggaatcaaatcaatcctatttattaaatcttcatgaacagttaaataataatattgaagaactaagattttatgcagaagaacacgctgttcctatagtggataaattaactttagacatgataaaacaattaattagaattcatcattcgaaaaatattttggaaattggaactgctattggatatagttcgatgcaatttgcttctgtttcaccagatatttctattactactattgaacgtaatgagaatatgataaaacaagcaaaatttaattttaaaaaatttgaatacgaaaatcaaattcgtcttatagagggcgatgcgctatcacagtacgataaagtgagcaatcatttatatgatatgatatttatcgatgcagctaaagctcaatctcaaaaattttttgaatattatacaccgttattgaaaaatggtggcttagttattactgataacgttttgtatcatggatttgtatctgatatagatatcgtacgatcaagaaatgttaagcaaatggtaaaaaaggtacaaaaatataatacttggcttatgaaacaaaagaactataaaacaaattttttaaatatggatgatggtttagccatatctattaaaggagaatgaatatgactgaattacttgtcactccaaaatctttaaatcatatgaaaacattgatagaactcggtgctgatgcatttgtgattggagagcaaaaatttggattgcgattacccggagaatttaatcgtgaagatgttcgaaaagcagttaatttagcacacgaacatgataaaaaagtatatgtggcagttaatggtatttttcataattatcatttaaatgccttagaaaactatattgaatttttacatgaaataagagtagatagaattatttttggtgatcctgctgtcgtgatgtatgttaaaaaacaaaataatccgataccattaaattgggatgcagaaacaattgttacgaattatttccaatgtaattactggggtgaaaaaggcgctaaaagagctgtattagcacgtgaattaaacctagatgaaattttaaatattaaaaaacatgcaaaggttgaaattgaagttcaggttcacggtatgacttgtatgttccaatctaaacgtatgttattgggtaattattacacttttcaagatagacaaatgaaaatccaacgtagtgagaatgagcaagatttattattatacgatgaagaaagagaaaataaatatcctgtgtttgaagattacaatggtactcatattatgtctcctaatgatatctgtttaattgaagaattagagccattctttgaagcaaatattgattcatttaaaattgatggtatcttacatagtgaatcatacattaatactgttacagcacaatatagagaagccattgacttatatcatgaagatccagaagcttatgaagatgaaaaatttatgttaattgatccaatagaagaaattcaacctgaacatcgtccatttgatgaagggttcttatataaacaaacagtatattaagggaggcgccagtatgaagacattaaatgaaattgaagtaaatgctaaaagaaaaataaaaaaacctgaattattagcgcctgctggaaacctagagaagttaaagattgcggttcactatggtgctgatgctgtatttttaggtggacaagaatacgggttacgttctaacgctgataactttactatggaagaaattaaagaaggcgttgaatttgcaaaccgttatggtgcaaaaatttatgttacgactaatataatcgctcatgatgaaaatatagacggtttagaagattatttacgtcaattagaagctacaggtgcaacaggaattattgtagcagatccacttattattgaaacatgtaaaaaagtagctcctaaattagaaattcatctctcaacacaacaatctctttctaattacaaagctgtggaatattggaaagaagaaggacttgatcgagtagtattagctcgtgaaacaggcgctatggaaatgaaagaaatgaaagacaatgttgatatcgaaatagaagcctttattcacggtgcgatgtgcattgcttattcaggtagatgtactttaagtaatcacatgacagcacgagactctaacagaggcggttgttgtcaaagttgtcgttgggattatgatttactagctgttgatgaagagggagaattagatttattttatcaagatggcgaagttgtaccttttgctatgagcccaaaagatttaaaattaattgaatccattcctcaaatgatggatattggtatagattctttaaaaattgaagggcgaatgaaatctattcattatattgctacagtagtatcagtttatcgtaaggttattgatgcatatgcagaagatccggataattttaaaattaaaccagagtggttaattgaattagacaaatgtgctaatcgagatacagcacctgctttctttgaaggaacgcctggatatgaagagcaaatgtttggtgttcaacaaaataaaaagtcaccatatgatttttgtggattagttttagattatgacgaagcaactcatattgctacaatacaacaaagaaatcactttaaacctggtcaagagattgaattttttggacctgaaattgaatcatttaaacaggttattgatgtcatttatgatgaagaaggaaatcaccttgatgcagcacgtcatcctcttcaaattgttcaaattaaagtgaatcatcctatttaccctaataatatgatgagaaaggaaatcggctaatgacacagacaacaatcatcggaatcgctggcggttcaggatcaggaaaaacaactgtcacaaatgaaataatgaaaaacttagaaggccatagtgttgctttacttgctcaagattattattataaagatcaatcacacttaacatttgaagaacgacttgaaactaattatgaccacccttttgcatttgataatgatttacttattagtaatttaaaagatttgcgtaacggtcaatcggttgaagttccaacatatgattataaaaatcatactagaagtgatgaaacaattgcatttgaacctaaagatgttattatcgtagagggtatatttgctttggaaaataaaacattacgtgatatgatggatgttaaaatatacgttgatactgatgcagatttacgtattttaagaagacttgtacgtgacacaaaagagcgaggacgctcaatggaatcagttattaaccaatatttaaatgttgtcagacctatgcataatcaatttatagaaccaacaaaaaaatatgctgatattattattccagaaggtggaagtaataaggtggcaattgatataatgacaacaaaaatacaaacgcttgttgggaagcattaacgaataatatgtatttttcaaaattaaattaacttgttgaaaaggaagatgaacttatggaaaatcaaaaacaatatccaatgacacaggaaggttatgaaaagttagaacaagaattagaagaacttaaaacagttaaacgtcctgaagtagtagaaaaaatcaaagttgctagatcttttggtgacttatctgagaactcagaatacgatgctgctaaagatgaacaaggttttattgagcaagatattcaacgtattgaacacatgcttagatatgctttgattattgaagacaacggtgataataatgttattcaaattggtaaaactgttacgtttgtcgaattacctggtgatgaagaagaaagctatcaaattgttggatctgcagaagcagatgcgtttaaaggaaaaatttcaaatgaatctccaatagcaaaagcacttattggtaaaaatttaaatgatgaagttcgtgttccacttccaaatggtggagaaatgaaagttaaaatcgttgatattaagtaacaaaaaatccaaaaatcattttgatttttggatttttttatagttaaatatttataattatttaactataaattagatataagcaagtacattcatttaatttttagaactttcacatgacaaaaatataaatatatgcttaaataacaatgtagacaaattatataaatatcttgtactgaaagggggtaagcgattacattaatgcattacttaccttcttttattattgtctatttgaaagacatattaaactactatgaatacgtggatattttatattactaatatataaaatgaaatacgttatttataatcgaaggaggaccatcatctttggaaataaagattattaatgaacaatcaattgcgctttattttaaagaagaaatatctgaaagtaattacagagatgttgaatccgttactaaacatatacacgctaaaagaatagatggtatcaaagatgtgataccgtcatatagagcaattatgataaattttgataatataaagcttaattttaagcaattaatagatatattagatttaaaacagttaaatggtgaacatgctaaagatatttcagataaaacgatcatacatattccagtattatataattcagaagtcggacctgatttaccatatgtagctaaacataacaaactaactactgatgaagtcattcgaatccatactcaaaatgaatatctcgtttacatgttaggttttatgcctggttttccatttttaggtggattggattctcgtttacatactccacgtcgagatgaacctagagtcaaaattgacgcaggttcagtaggaatagcaaataatcaaactggtttatatccttctgattcaccaggtggttggcaaattattggaagaacaccattaaaagtatttgatatcaacgacgatgaaatgtctttatatcaagcgggggattatattaagttttattctattgatgaaaatacatttaacgacatccaaagtgaaatagcagaaaatcgatttaataaagaaaagtgggtgttaaatcatgtcgattagtattattcaacctggtatgtttacaactgttcaagatgaaggaagatttggttttcaacacctaggtttttcaagtgctggtgctatggatttatatagttatttaattggtaagactttaattggtaataatggacccagccttgaatatactattatcggtccaacacttcaatttaataaagataatacatttattttgacaggagcacatgtaaacgcaaaattaaatgaagagacagttgatattaatactgtaatttatgcatgcaaaggcgatattttgaaagttggagcagtgactgcaggcgcccgtggttatattttctttggccatcctttagatattcaaccaatagcagaaagttattcgacacatactagaagtaaaattggtggttacaaagggagaccattatcaaaaggagatttgatatacttaaaagaaaatccatctttcaaacaaaatttgggtaaaacaacagtttataatgctattcccgaagataatataatacatattattaccggtccacaaattgaagcattttcaaaggaaagtataaataagctcgttaatatggaatataaagtttctgaaaaatctgatagaatggggtatcgtcttaatggtgagcatatccctcctaaaactggagcagatattatttcagaacctgttgctttaggaagtattcaagtcccaaatgatggtaatcctattatcttattaaatgataaacaaactataggtggctatacgaaaatcgctacagtcactcaactggatttaaataaaattgctcaatttaagccgggagatttaattcgatttaagtggtcaacgattgaagagtctgcaaaggttcaggaacaatatctaaatcactttaatcatttaaatgctgaaattaacacgtcaccaacctttaatatgggtgaaatgagaccgacagcaaagaaattgactaaaatcattacagaggagagatagttatggatattaaaaaaatagaagaagtcattaaacttgtaaaatcaaatgatgtaaaaaaatttaaatataaagataacaaaaacgaaatcgaattagattttactgaacaaagtaacaatcaaaataatagtactccagtaatacaatttgaagggaattctcaagacaaaagtatttcagaaaataacccttcaaatgattcatcaaaaacaattacttctcctatggtaggaacattcttcttacaagatagcaaggaattaacggatcctataattcaagtaggtgacaacattaaatctggtgatattatcggatatgttgaagcaatgaaagtaatgaatgaagtgactagtgatatagatggtgagattaccgacattgttgttgaacatggtacaaacgttgaatacgatcaagttctagttaaagtaaaataaagggggcaaaaatatgtatcgttgtttagtagcaaatagaggagaaattgcggtacgtatcattcgagcgtgtcgagaaatgggaatagaaactgttgcagtatacgctaaaggtgatgaaaaaagtcttcatgtaaatttggctgatcaagcagtttgcattggagaagcaaatcctttagatagttatttaaatatagaacgtattattggtgcagctgaaatcacaggttctaatgctattcatcctggatacggatttctatcggagagtacaacatttgcccaaaaagttgaagaaaatgatattcattttattggccctaacaaaaaaacaatggaaatgatgggtgataaaataactgctcgtcaaaccgttcattcagcaggggtaccagttattcctggctcaacagatgcagtaaattctgtagaagaaatcaaagaattagcaaaagacataggatatcctttagtattaaaagccgcaagtggtggtggcggtaaaggtattcgaattgttaaagaagaaaatcaacttgagaaatcattaaaagaagctaaaagtgaaggtcaaaaatattttaatgatgatcgagtgtatgtagaagcatttattcctgttgcaaaacacatagaagttcaagtgattggtgacggaaaagaaaattatgttcatttaggtgaacgagattgttcagtccaaagaaaaaaccaaaaattaatagaagaagcaccatgtgcagcactgtctgaagaacgacgtgaaaaaatatgtaatgatgctgtcaaagttgcaaaagcctctaattatcgtagtgctggtactattgaatttttagttactgaagaggcacattactttattgaaatgaacgcgagaattcaagtagaacatactgttactgaaatgcgtgcagatagagatttattacaagcacaattatatttgttattacataataaattaccgtttagtcaagaagatattgtattcaatggtcatgtaattgaggcacgtattaacgctgaaaatccagaaaagaaattccaacctactccaggtaaagttaaacgtctacacttacctcaaggttttaatattagagtagattcgttattatatgctggttatcaagtatctccttactatgattcactagttgcaaaagttatcgtaaaagactctaacagaacttctgcgattaacaaattaaaagtggcacttgacgaaatggtaattgatggtttcactactacggctgattttctatatgcagtattaagttacccaccatatgcaaaaggaaatgcaaaagaagttgatattaaattccttgaaaaacatcacatagttaaaggagtaaaattatgatgaaagttgatttaaactgtgatctaggtgaagcatttggtaactattcatttggaggtgataaagatatcattcctttaattacatctgctaatattgcctgtggttttcatgcgggtgatgaaaatgtaatgaatcaaacagtaaaattagctaaagaaaaccatgtgagtattggcgctcatcctggacttccagatttaaaagggtttggtcgtcgaaagatggatattaatccaaccgaagtatataatctaatagtttatcaattaggtgctttagaaggattttgtaaagtacaccaaacacgaataaatcatgttaaaccacacggtgcactgtataatatgggtgctaaaaataaagacattgcaaaagcaattgcaaaagcaatatacgattttgattctgcaataatgcttgtaggtttatctaattcattattaatatctgaagctaaagcaattggattgaaaacagcttctgaagtgtttgctgatagacgttacgaagataatggacaattagttaatcgtaaagaatcagacgcagtcattactgatactgacgaagcactaaaacaagttttgaaaatggtaactgaaaacaaagtgataagtcgcaatgggaaagaaattgatttggaaacagatacgatatgtgtccacggtgatggtaaacatgcactagaatttgttgaacaaataagaaaaaaattaacgaaagaaggcattgatattcaatccttataagggggttttctaatgaaagaaagtttaaatcaaaaacaagataaagacaattttaaatttacaaaaagtcatagacgcttactttatggatctgtatttttaatggctacatcagcgattggtcctgcatttttaactcaaactgctgtgtttacggcagaattttatgcaagtttcgcttttgcaatcttaatctctatattaattgatattggagctcaaattaatatttggcgtgtattagttgtaacaggtttacgtggtcaagaagcatcaaataaagtgttacctggattaggaactttaatttcaatattgattgcttttggaggacttgcttttaatatcggaaacatagctggtgctggtttaggattgaatgcaatgtttggacttgatgttaaatggggagcagcgattacagccatttttgcaattttaatatttgtaagtaaaagtggtcaaaaaattatggatattgtttcaatgattttaggagtaataatgatattagtagtagcttatgtcatggttgtatctaaccctccctatggtgatgcacttatccattcagttgcaccagaacaccccattaaattaattttaccaattattactttagttggaggaacagtaggtggatacatcacatttgctggcgcacatagaatacttgattctggaatgaaaggtaaagagtttttaccatttgtgaatcgttcagctattgcaggtatcttaactacaggtattatgagaacattattattcttagcagtacttggagttgtagtgacaggtgtcactttaaatgcagataatccgccagcatcagtatttgaacatgctattggaccaataggaaaaaatatttttggagttgttattttcgcagccgcaatgtcatcagtgatcggttcagcatatacaagtgcaactttcttaaaaacattacacaaatcattatttaataaaaataatttgattgtcattgtcttcatcgtgatttcaacaataattttcttattaattggaaaaccaattagtttattgattattgctggagcaataaatggatggattttaccgattactttgggtgcaatattgatagcgagtagaaaaaaatcaattgttggagattataaacatccaacatggatgctagtatttggcattgtagcagttattgttacaattataacaggtatattgtctctacaagatttagctactttatggaaaggttaatcataaataaatatctaatttaggattttaaaatttaactgtcgacagtgtttaactgtatcgacagtttttttattaaatcatttacaagattattttaatagaaaaagttagtcgtgatgaactagaaattatgttagaataacatgtgctaagattaaagttgaggtgtaaatatgattggaattattggagctatggaagaagaagtagcgattttaaaacataaattagtgaatttaaatgaggttgaagtagcacatgtaaaattttatcgtggtcaactaaatgataaagatgttgttttaacacaaagtggaattggaaaagtaaatgctgcaatatccacaacattgttaattgaaaaatttaaaccaacattaattataaatacaggttctgctggtgctttagatgacagtttatcagttggagacattttaattagtaatcatgtgatgtaccatgatgcagatgcaactgcttttggatacgacatcggtcaaatacctcaaatgccagctcaatttgaagctaaccaacaattactccaattaactgaaaaagttgtaaaacagcaaaatttaaccgctaaaattggtcaaattgtaagtggcgatagctttattggtagtagcgaacagcgattaaaaattaaacgtcagttttcagaagctatggcagttgaaatggaagcaacggctattgctcaaacttgttatcaatttaatttaccttttatcgtcactcgtgctgtttctgatttagcaaatgggaaagcagaaatgtcgtttgaagagtttcttggtaaagcagctcaatcatcaagtaacattgttgaacagttggttaaagaaatataaacaataaataatttaaaggtgaaatgaatgggattaattaaaaaatattttatgcctagtgattatgtacaatctgtatttcaaattgatattgaaaagttagcaaattctggttttaaaggtattattacagatttagataatacattagtaggttgggacgttaaaacaccaacgaaagaaatacaagaatggtttaaaaaagcaaatgatttaggattaacgattacaattgtatcaaataatagtgaaaaacgtgtttccggtttttcgaaagacttagacgttgattttatctttaaagctagaaaacctatgggaagagcttttaaaaaagctatacaacacatgaatattaaaccagaagaaacagtcgttataggtgaccaaatgcttacagacgtacttggtggcaataataacggtctatatactatcatggtagttcctgtcaaaaagacagatggatttttaactagactaaatagaataatcgaacgtcgattattaaactattttaaaagaaaaggctatattacatgggaggaaaattgattggatgaaactttaaaatgtatcggttgtggcgctcctttacaatctgaagataaaaacgcacctgggtatgtgccagaacataatttatttagagatgatgttatatgccaacgttgttttagattaaaaaattataatgaaatacaagatgtaggaatggatagtgaagattttttaaatttattaaatggattatccgatagacaagggattatcgttaacgtaattgatgtttttgactttgaaggatcgtttattaatgctttaaaacgaattgtaggaaataagaaaatcattttggcggcgaataaattagatcttttaccaagacaaattaaccaacgtcgtgtaaaagaatggttaaaaagaacagctagaaagtatggattagaagctgaagaggtggtattaatatcagctcataaaggatggggtattgatgcacttttagaatcaatcaaccgttttagaaatcatcaagatgtttatatcgttggtactacaaatgttggtaaatcaactttaatcaataaattaattgagcaaagtgtaggtgaaaaagatgtcgttacaacatcaagatttccaggtacaacattagatatgatagatattcctttagatgagaacacatttatgtatgacacacctggcattatacaagcgcatcaaatgacccattatgttactgaaaaagaattgaaagtgattattcctaggaatgaaattaaacaacgtgtatttcagttaaatgagggacaaactttattcttcggtggattagctaggatagattatgtttctggtgggaaacgaccacttgtatgttatttttctaatgatttaaatattcatagaactaaaattgaaaaggcaaatgatttatggcgaaatcaaatagggcatttattaagtccacctagtaaccccgaaaaatttaatataagtgatatgaaagctgtacgtctagaaacagggaaagaaaaacgtgacattatgatttctggattgggctttattacactcgaagcaggtgcaaaagtgattgttcgtgttcctaaaagtgttgatgttgttttaagacaatctattatgtagggaggattcataatgaaatttgcagtgataggagatccgatttcacattcattatctccagtgatgcataatactaattttaaagttttaggtttaaatgatacttatgaagcattgcatataccggttcaagatttcgataatattaaagaaataataactgaaaaaaatttaagtggatttaatattactattcctcataaagaacgcattattccattcttagatgatattgatgaacaagctaaagctgtaggtgcagtgaatactgtgaaaatagaagggaataaatggattggttataatactgatggtcttggatacgtaaaaggattaaaacaagtatatcctgacttatcaaatgcatatattttaattcttggagctgggggtgcaagcaaaggtattgcaactgcactttcacaatgtgtacaacctaaattaactatagcgaatagaacaatgagtcgctttgataattggaaattagatattaatgcgattaccctacaacaagctgaacaatatcttgatgagtttgatattattattaatacaacatcagcaggattagataataataaagagagtgtaattcgtctcgatcaattatcaccgaatacattggtaagtgatatcatttatattccctataaaacatcatttttacaacaagctgaagagaagggtaaccctatttataatggtctagatatgtttgtatatcaaggtgctgagagctttaaaatatggactggcaaagatgctgaaattaaagaaatgaaattagcagttttaaatcaattaaaaggagaataatatgctatgctaacaggtaaacaaaaaagatatttaagaagtttggcgcataacattgatccaatttttcaaataggtaaagctggaattaatgataatatgattagtcaaatagatgaaacacttgaaaatagagaattaattaaaattcatatacttcaaaataattttgatgataaaaacgatttagcccaaacgctaagtcaagctactaatagtgaagtggttcaagtcattggatcaatgatagtcatttatagagaatctcaagaaaataaggaaatttcattaccataattctatgaaaaaaattgttttatacggcggacaatttaatcctattcatactgcacatatgttagtagctaatgaagtatttcataaaattaaaccggatgttttctattttttaccaagttatatggctccacttaaagaacataacgattacttagatgctcattatcgcatcaaaatgattaatatggtaattgagcagttaggtttcggaaatatttgttatgcagaattagaaagaaaaggtcaaagttatacgtatgatacattaaaagctttaattgaccaaaatccttacgataagttttattttgtaataggatcagaccaatatgatcaacttgataaatggtataaaatagatgaattaaagcaaatgattatctttatagtagtaaatagagaaaaaaatattcaaaaggttgatgaaaatatgatttccatatctattccaagaatggatattagttcatcaatgattagacaacgtgtaaaagataaaaaaacaattgatattttagtccctcgaaatgttagtaaatatattagagaggaaggattctatgaacactaaagaagcaaaaaaacttatcgaaaataaattgcccgaaaagcgttttaaacattctcttagagtagctgacacagcagttaagcttgctgaaatctatgatggagataaaagtaaagcagagttagcaggcattttacatgattattgtaaatatgatgatttaggaaaaatgtatcaagtcgttcgccaacatgatttagatagcaatttgttaagttatggaagtgaaattcttcatggacctgtatgtgcagcattaatgaaggctgattatggcatcgaagatgaagaaatattattagccattaaatatcacactactggtcgtaaagaaatgacaaaaactgaaaaattggtatttattgctgactatatagaacctggtagaaaaactccaggagttgaagaaattagagatatggcatacaatcaaggtagcttagataaaacaatttatgaaatatcaaaacgaacagtcttatttttaattagtaaagatattactgtttatggttctacgattgaatgtttaaattattataattatagtgatcaaaagataaaggatgattaaatgaattcagaagaattattaaatattgctgtcacagcgacagaagataaaaaagcagaagatattgtttctcttaatatgcaaggtattagtgatatgactgattattttgtagtgtgtcatggtaataatgaacgtcaagttcaatcaattgctagagcagtaaaagaaaaagtgcatgaaaataatattgaagtaaagcgtatggaaggttatcaaagtgcaagatgggtcttaattgatttagcagacgtagtagttcatattttccataaagatgaacgcaattactataatatagagaaactttatcaagatgctccaatagaatcatataatcaggtagcatattaaaatgatgcaatacactgaaatgagtaaagtttatgatcagcttactcaagatcaaccttatgaagaatggtttaatattgtaaaatattatacaagaacaatgtcttctaatgattcaataaatattcttgatattggttgtggcactggaagtttaacgcaattacttccttctattggaacggttacaggcatggatttaagtacagacatgttatctattgctgcaaataaatctaatcaagttacttggttagaaggtgacatgaacgatttttcattaaatacaacatatgatgttgtaacaatattttgtgattccctgaattatttacctgatattgatgatatcgtaaatacgtttaattgtgtatttaatcatttatctcatttaggaatgtttatattcgatattcatacgatatataaaatgaacacagcatttaataatcaatgttatattgatgataatgataatatatttttagcgtgggaagctataaagggtgaagaaccttatagtgtttatcatgatatgagtttctttttaaaacagcataatggtaattatcaccgttttaatgaatcacactatcaaagaacatttgaaaaagatttctatattcgattgttaaaacaaactggatttaatcgtattgaaacttttgtagactttgacatcaataatcataatgaaaaaggtgacagattgttttttgttgcttataaataaaataaagtaaactcatctccttatacgtttatacatataaggagatgagtttttgtttaagtatagaaatgaaataattcaattattaactaagtggaagactcatatcatcattttaattgcagtagtgttactttttatagtgattctcatgcttatgaaaaataatgagacttcagaacatatgacaacatctaatgctaataatagccaatttaataataatgaaaaatataataaaaataaaaatgataataatttatccacttcttctaaagaaaattcaactatttatgtagatgtcaaaggggctgttaaattaccagatgtttatgaaatgaaaaagaacgatagagttaaagatgtattaaaaaaagctaaagtttctgaaaacgctgatattacaaaaatcaatttatctgaaaaacttactgatcaaaaaatgatttatatacctaataaaaatgaaacgaaaataaatgctacacccactaatcaaagtaatttaaatacttctgaaagtattaaagtcaatcttaacacagcaaatgaaagagaattgcttaatgttccaggtatagggccaactaaagtgaaagagattattaaatacagagaggaaaagggacagtttaataatgttgaagacttaaaacaagtaagaggaattgtagggaaaacttttgagaaacttaaagattactttactacataaattaaattggaagaaattttaatataaattataatagatatatatttttttaaggagttgaactttatggatagaataaaatgggatgaatattttatggcacaaagtcatttgcttgcattacgttctacatgtcaacgattatcagtaggcgcaacaattgtaaaggacaatagaataattgcaggaggttataatggctcagtagcaggagaagttcactgtattgatgtaggatgtttaatagaagatgatcattgtattagaaccatccacgcagaaatgaatgcattattacaatgcgcaaaacaaggtgtatcgtcagataatgcaacgatatatgtcacacattttccttgtttaaactgtactaagtctattattcaagcaggtattaaaaaaatatactatgcaaaagattatcataatcataaatatgctattaaattattaaatcaagcaggtattgagtatgaaaaaataccattttctgctaataaaatagctgaatttttaactaaagaatgttagttgttttatatgcactttcttttttaagtggtatattatgggttcatcttaaattattttcaattttaatatttactattatattaattattgtgtatcgaaagagtattcctttataccactatttattaattctatcctttttctttctagctttatttcaagtacaccatactttgaaaacaaatcatttaatactccaaaatttaaaagtccacagtaatatacattcaaaagtaacgtttcaaaatgatataaaacaattcaatcaaattattaaaggacaatttcgatataaacataatctttatcactttacttttaaaagtccacaattgagagctaaagatttaaaaaatcgagaatgtaaaattaatggaaatatcacaaatagtattcaaaatgaagtctatgtttatatcaatcaaatagataataaatattgtactaaggttaatcatataagttttatagataaacacctaaattatattcaaaacaagttatatcattcttcgttaaaatatccagagagagtattagctttaattactggggatactggtgcaattgatacagattacttagataaagttaaagctataggtatttatcatttacttgctgtcagtggatcacatgttgctaccattatttttatcattcaatatagtctggtcaggtttaatattccaaaattatttatacgagtttttattattataatactaatactatttattttttatacaaattttgcaccgagtgctttaagagcagttttaaccgctattactttttttattatccctaaggcttttaaaatttcgtctataagtgtattatctttagtctttttattgatgacaatttggaatatgaattttgcttatgatattggatttcaattttctttcatcatttctttttttatactactttctaagccactatttaataatcaatcaattttaaagaattatatttatataacaattatcgctcaattttcatccatgattattagtatttaccattttaatcagtttcaatggattggttttatttctaatgtaatatttgtcccattatattctttcattatttttccactttctattgttttatttattttctatcatttctttagtgacttgcgatatataaatatggttgcaaatcaattatttgaactgcacgatagaataatgcaaccgttcattttatttagaaattaccaaataaatatcgctgatcaatcaaatttaagtctactatactgtttcattttattaactctactaactacatttatatgttataaaaattatagagtattcttaattataattatcttatttataatatttttaagattcactaatcaaccattagcgacgacgtttactgctttaaacgttggccaaggtgatagttttctttttcaaacaaaaaataatgaaactgtgatggtagatactggtggtaaagtagttcaaacgaagattaaagataatcataatattgcgaaatatcatattattcctactttaaaatctagaggaatatcaaaaattgatcacttaattcttacccatccacataatgatcatatcggcgaatttccttatttagcacaaaatataagaatcaaaaatttatatttatatataaaaagttattctatagaacaaattaaaactatacatacaacttgtagtatatatcatataaaagttattgatgtttcagagactaataaaattcagttgaaagaagctaaaatatcatttttaaatgcttttattgattccaatgaagacaaaaatgcacaaagtataatctcattaatagagtacaaaaattacaaattattattgatgggcgacgcaattgaagaaaatgaaaatttattattaaagaaatatcatttaccgttaattgatgttctaaaagttggacaccatggcagtaaaacaagtagttcaaaacatttgttagaaatcatacaacctaaaataagtattatttcaagtggaaaaaataatacttttcatttgcctaataatgaaacgatagataaattagagaaaattaattctcatatctacaatactcagactgatggagatattactttaaatctcgataatcaacttatatcatcctttaataaaagttaatgatagagaataataattacacaatgctataataacttaatggtagaattttgaaagggtgcaagtttacatggctaataatataatggctatatacggagaagtgccagaactagtggagaaaaaaagtaatgaaatcgtagaaagttacttaaatgaaaaaaaagacgattttaactatgttaaatataatctttatgatacaagttttaatcagattatggaagaagcattaacgatgccttttatttcagagaaaaaagctatcgttgttaaaaatgcttttatctttacaggtgagaaagtttcaaaagatatccaaccaaacaacgaacaagtgaacgaatttttagaaaaatatgatggagaaaattttatcatttttgaagtgtatcaaaataaattagatgaaagaaagaaaattactaaaactttaaaaaagacaagcaagctaactaaagttgaacagatgtctgaacaagagattaaaaaatggataaaaaataaacttcatgaaaattttaaagatattaaacaggatgcattagatttatttatagaattaactggtattaactttaatatagtttcgaaagaattagaaaaaatcattttattcttaggagagcgaccaactataaataaaaaagatgttgaagagattattaatagaagtttagaacaaaatgtttttcttttaactgaatatatacaaaaaggagaaaaatataaagccattcaacttattaaagatttaatagtaatgaaggaagaacctattaaactattagcattaataacaagtaattatcgattatattatcaatgtaaaattttaagtcgaaaaggatatagcggacaacaaattgctaaaacaattaatgtgcacccatatcgagttaaattggctttaaatcaagtaaaacattatcaattaactcatttgctaaatattattgatcaatgtgcagaaactgattataagttaaaatcctcatatatggataaacaactgattttagaattatttattctttctttataaataaaaaaagttcaagctaatcgcttgaactttttaaatgattatttgcttgaagacattaattgagatttaatgcggtcagctttatttgaatgaattaagttactgtgtgcagctttatcaactgatttaattgcgaagttaactaattcagctttattatcagcattattttcaattgctgatttagcatttttcactgcagtacgcatagcgtttttttgtgaaatattacgttcttcagcagtttcagttgttcttacacgtttaatagcagatttaatatttggcattactgtcacctcctaaaagtaatctaagcatatcaaattttattttgattacaacaagaaatattttatcaaaacatgaatatttgtgcaatcatttattaacattaaacctatttatttacaaaaagaacgatattaactattggaaacctttatacaacactttataattgttatgtagtttaagaaaaatcttaaaattaaaagtaaataaagaatcttcacatgatgattcttttctcttaaatttgcaaataatgattaaaaacgatattatgtcaaagatgtatacacatacgggtaaatttacgaaagcgagaatgataagttatggatatgcaagaacgctataaccgaagagacaatataagaaacttttctataattgctcatattgatcatggtaaatcaacgttagcagatagaatattagaaaatactaaatctgtagaaactagagaaatgcaaaatcaattgcttgattcaatggatcttgaaagagagcgcggtattacaattaaattaaatgctgttagattaaaatatgaatctaaagatggacagacttatacgtttcatttgatcgatactccagggcacgtcgatttctcatatgaagtttctcgttcattagctgcatgtgaaggcgctattttagtagttgatgctgcacaaggcattgaggctcaaactcttgctaatgtttacttagcactagataatgatttagaactcttaccggtagtaaataaaatagatctacccgcagctgaaccagaaagagtaaaacaagaattagaagacgttattggtttagataaagatgaagttgtgttagcaagtgctaaatcaaatattggtattgatgaaatcttagaaaaaattgttgaagttgttcctccaccagaaggagatcctagtgcaccgcttaaagctcttatttttgattcagagtacgatccttatcgaggtgttatttcttctattcgtgtaatggaaggcgttgtaaaagctggagatcgtatcaaaatgatggcaacaggaaaagagtttgaagttactgaggttgggattaatactcctaaacaactaccaattgaagaacttacagtaggcgatgttggatatattattgcaagtattaaaaatgtcgacgattcacgtgttggggatactatcactcatgtagatagaccagcagatgctccgttaaaagggtataaaaagatgaatccaatggtttattgtggattgttcccaattgataataaagattataacgatttaagagaagctcttgaaaaacttcaattaaatgatgcatcattagaatttgaaccagaatcatcacaagcgttgggatttggatttagaacaggattcttaggtatgctacatatggaaattattcaagagagaattgaacgagagtttggaatagaattaattgccactgcaccttcagttatatataaatgcgaaatgaatgatggttcagaagttatagttgataatccatctcaaatgcctgaacgtgatagaattaaagcgatttatgaaccatatgtaaaagcaacaatgatggttccaaatgactatgtaggagcagttatggaactgtgtcaacgtaaacgtggccaatttataaacatggattacttagatgatatccgtgtaaatatcgtttatgaaattccattgtcagaagttgtatttgatttctttgaccaattaaaatctaatacgaaaggctatgcttcatttgattatgaatttatcgaaaataaagaaagtaatttagttaaaatggatattttattaaatggtgacaaagtagatgcacttagttttatcgttcacagagattttgcgtatgaacgaggtaaagctcttgttgaaaagttaaaaacacttattcctagacaacaattcgaagttccggttcaagctgcaataggtcaaaaaatcgtagcccgaactaatattaaatctatgggtaaaaatgtgttatctaagtgttatggtggagatatcagccgtaaacgtaaattacttgaaaaacaaaaagctggtaaagcaaaaatgaaagctgttggtaacgtagaaataccacaagatgctttcttagctgttcttaaaatggatgatgaataaattattaatgcgaggctggaacctacaatcatgtgttccaacctcgtttgtgttttaaaaacttaaaattgagggtgtaactatgtcaataaaaagtgcgtatattcatatacctttttgcgttaggatttgtacatattgtgattttaataagtactttattaacaaacaaccagtagatgaatatatttctgcattaattaaagaaatgaaaacaagtgaaattagaaatcttgaaacaatgtacgttggaggaggtactcctacagctttaaatctcaagcaacttgaaacacttttaaaagcaatacagtcaactttttcaattaaaggtgaatatacatttgaagcaaaccccgatgaattaactttagataaagtgaaattactgcactcatatggtgtaaatagaatttctatgggtgtacaaacatttaaaccagaattactaaaaattctaggtagaacacataaaactcaagatatatataatgctgtagattatgctagaaaagcaaatattgaatcgattagtttagacctaatgtatcatttaccaactcaaacattagacgatttttcagatagtcttaatagagcaatacaaatggatatagatcatatttcaagttatggattaattttagaacctaaaactcaattttataatatgtatcgaaaaggcaaattaaaattgccaaacgaagatctaggagctgaaatgtaccaatatttaatgaatgttttaggaaaaacttcatttaaacagtatgaaatctcaaatttcgccaagtctcatcatgaatcaagacataataagacttactggctaaatgaagaatattatggttttggagcaggcgcaagtggatatgtaaatggagaacgctattcgaatctcaatcctgttaatcattacatcaatgctattaataatcatcaacgtcctattttaacttccaatttccctactcaatcagaaagaatggaagaagaaatgtttttaggattaagaatgaataaaggtgtcgataaagttaaatttctttcaaaatttggtacctcaatggataaagtgtttggtgagacaataaataatctgaaaaagaaaaatttactctatgaaagagataaccatatttcattgacaaacaggggaaaaatcattggaaatgaagtttttgaagcatttctattaaattaataaatttttttgaaaaataagagctttaacgttgacttactttgaccaatttgttaaattataattagcacttgagacaaaggagtgctaatgaggtgaagacatgattacaaatagacaattaagcattttaaatgcaattgttgaagattatgttgatttaggacaaccgataggttctaaaaccttaattgatagacataacttaaatgtaagcccagctactattagaaacgaaatgaagtatttggaagagttgaattttttagaaaaaattcattcatcttcagggcgtgcaccttctgaacaaggttttagattatacgtcaatcaattgttaaaacaaacatctcatcaaaaacaaaataaagttcaacgtttaaatcaacttttgattgagaatcattatgatatttcttcagcccttagttattttgctgatgaattatcaataaaatctcaatatgcaacgttggttgttcgacctaatcacaaaacagatattataaataatgttcatttgattcgtgcaaattcgtctataattataatggtcatcatctataattctggacatgtagaacatttacatttaagtgaatcaatggagtttgacgatgataggttaacaaggatttcaaattttttgactgataattattataaaagtcaatttgattttaataagaagttaaaacaatttacaaattctattgcggaacaatcctttataaatgaattaactatcatgctaacttctcatctccataaacaaagtaatagcatttttatgggtggaaaggttaaacttattgatgcactgaacgaaaccaatgtttcttctattcagccaatcttacaatatctagaatcagaaaaaattatcgagttactagaaaatatttctacttctgaaattaatgttaaaattggccacgaaatagataaagggttaagtgatatttcaattataacgagccagtaccattttgatgatgcactaaaaggacaaattgcggttatcggaccaactgcgatgcattatcaaaatgtgattcaattacttaatcaaatatggtgaatctaattgtaattatattggagggcataaaatgacagaaaaagacgaatcagtgaaaaataacactgaagaaaatgaaaccgttaaaaacgaagcgtcgtctttaaatgatgtagaaaataatccttctgaagaagaattaaataatgaatctacatctgaacatgataatgaagataaaaatgatcaatctaaagacgaagagattcaacaattacaattaaaagcaaatgaaaatgaagaaaaatatttaagattatatgctgaattcgaaaattataagcgtcgaattcgaaatgaaaatgaaacaaataaaaaatatcaagctcaacacgtgcttactgatattttacctactatcgataacattgaacgtgcactgcaaattgagggtgatgatgaatcatttaaatctctcaaaaaaggcgttcaaatgattcatgaaagcttattaagagcattaaaagacaatggcttagaagaaattgaatctgaaggtcaagaattcgatccaaacttccatcaagctgttgttcaagatgacaatcctgattttaattctggtgaaatcactcaagaattacaaaaagggtataaattaaaagatagagttttaagaccatctatggtcaaagttaatcaataagatttaaatttgaaaaatttttaaaattggaggaattttattatgagtaaagtaataggtattgatttaggtactacaaattcttgcgtatctgtattagaaggagacgaacctaaagtaattcaaaatcctgaaggtgctagaacaactccatcagttgtggcatttaaaaatggtgaaactcaagtaggtgaagttgctaaacgtcaagcaattacaaacccaaatactgtacaatcaattaaacgtcatatgggtacagattataaagtagatattgatggcaaatcatatacaccacaagaactttcagcaatgattttacaaaatttaaaaaacactgctgaaagttatttaggagataaagtggataaagcagtaatcactgtgcctgcttatttcaatgatgctgaacgtcaagctactaaagatgctggtaaaattgctggtttagaagtagaacgtatcattaacgaaccaacagctgcagcattagcttatggtttagataaaactgaacaagatcaaaaagtcttagtatttgacttaggtggcggtactttcgacgtttctattcttgaattaggcgatggcgtattcgaagtattatcaactgcaggggataacaaacttggaggggacgactttgaccaagtaatcatcgactatttagtatcagaattcaaaaaagaaaatggtgttgacttatcacaagataaaatggcgttacaacgtcttaaagacgctgcagaaaaagctaaaaaagatttatctggtgtatctcaaacacaaatctcattaccattcatttcagctggagaaaatggtccattacacttagaaatcaacttaactcgttctaaatttgaagaattagctgattcattaatcagaagaacaatggaaccaactcgtcaagcacttaaagatgctggcttatctacttctgaaattgatgaagttatcctagttggtggttcaactcgtattcctgcagtacaagaagcagttaaaaaagaaattggtaaagaacctcataaaggtgtaaacccagatgaagttgttgcaatgggtgctgctatccaaggtggcgtaattactggtgatgttaaagacgttgtattattagacgtaactccattatcattaggtatcgaaattatgggtggtcgtatgaatacgttaattgaacgtaatacaacaattccaacatcaaaatctcaagtatattcaacagcagctgacaatcaaccagcagtagacattcacgtattacaaggtgaacgtccaatggcttcagataataaaacattaggtagattccaattaactgatattccaccagctccacgtggtgtacctcaaattgaagtaacatttgatattgataaaaatggtatcgtaaacgttactgcaaaagacttaggtacaaataaagaacaaaatattactattcaatcaagttctgcattatctgatgaagaaattgatcgtatggttaaagatgctgaagaaaatgctgaagcagataaaaaacgtcgtgaagaagtagacttaagaaacgaagcagatagcttagtattccaagttgaaaaaacaattaaagacttaggtgaaaatatcagtgaagaagacaaatcaaatgctgaaagcaaaaaagatgcacttaaatcagcattagaaggtcaagatttagatgatattaaagctaaaaaagaagaattagaacaagtaattcaagaattatctgctaaagtatatcaacaagctcaacaagctcaacaacaagcacaagacaattcacaacaatcaaatgatagcaatgttgaagacgctgagttcaaagaagttaaagacgacgaagataaaaaataaagctaatcgtttataacgtttactatgtaaacatttataaatgtaagccaaaaagtcaaagtcaattgaacattggctttgactttttcttttataattaagatacttgagtatgtgtttaaattataaaaatttagaaaaggagagatacttgtggctaaaagagattattatgaagttcttggcgtaagtaaagatgcttcaaaagatgaaattaaaaaagcataccgtaaattatcaaaaaaatatcatccggacatcaataaagaagaaggcgctgatgaaaagttcaaagaaatttctgaagcatacgaagttctaagtgatgacaataaacgtgcaaattatgaccaatttggacatagcggtgcccaaggtggatttggcagtcaaggatttggtggacaagacttcagtggcttcggtgaaggctttgaagacatatttagctcattctttggtggttcacgtcaaagagatccaaatgcacctagaaaaggtgacgacttacaatacactatgactttagaattcgatgaagctgtttttggtactaaaaaagaaatttctattcgaaaagatgttacgtgtcatacatgtcatggtgatggcgctaaaccaggtacaagtaaaaaaacatgtagctattgtcatggttcaggacatgtatctgttgaacaaaatacaattttaggacgcgtaagaactgaacaaacttgtcctaagtgtgagggtagtggtcaagaatttgaagaaccatgtccaacttgtcatggtaaagggactgaaaataaaacagtaaaattagaagtaactgtacctgaaggtgtagacaatgaacaacaaatccgtcttgctggtgaaggtgcacctggtgaaaatggcggtccacatggtgatctttatgtagtattccgcgttaaaccttctgataaatttagaagagatggcgatgatttattctatgaacttaatattagcttcccacaagcatcacttggcgatgaaatcaaagtaccaactctaaacagtaacgttatgcttacaattcctgctggtactcaaaatggtaaacaattccgtcttaaagagaaaggcgttaaaaatgttcatggatatggccatggtgatttatttgttaatataaaagttgtcacaccaaataaactaactgatagacaaaaagaattaatgagagaatttgcggaaattagtggtgaaaatccggaagaacaacctgctaattttaaagacaaagctcgtaaattctttagaggtgaatagtcatgaactggacagaatttgcagtcactgtaaatcatgaagttgaatctttagtcactaacatattagaaaactatggttcaaatggagtagttatagaagattccaatgatttaattaatcaacctactgataaatttggtgaaatctacgaattaaaaaaagaagattaccctgaacaaggtgtgagattaaaagcatactttaatgaattgaaatataacactcaatttaaaaataaattagaaaatgaaatattaaatttgtatcttatagatgattcagtagttgagttttcagcaaagactattgctgaagtagattgggctaatgaatggaaaaattattttcatcctttcagagcttctaagagatttacgattgttccaagttgggaagactattcaaaagaatcagaagatgaattatgtatagaattagatcctggaatggcttttggtactggagatcatccaacaacaagtatgtgtctaaaagcgattgaaacttatgtaacacccgattcctcagtcattgatgtaggtacaggttctggtatattaagtatcgctagtcacttaataggtgttaaacgaattaaagccttagatatagacgaaatggctgttggtgtggctaaggagaattttagaaaaaatcattgtgaaaatgatattgaagccattcccggtaatctattaaaagaagaaaatgaaaaatttgatgtagttatcgcaaatattttagctcatattattgatgaaatgattgaagatgcttataatacactaaatgaagatggttattttataacttcaggtattatagaagaaaagcatgaagatatactgtcgcatatgaagcgtgttggatttaatattgtatcaatcaatcatgacaatggatgggtttgcattgttggtcagaaagcgagtgaataatttgcaacgatactttatcaatcaaaacgctgattctcatcagcgtttttttattaccaatgaagaagatatacatcatatcaaaaatgtaatgagaaataccgttggtaacaaaattataattaattttaatgataaaaaagtatttattagtgaaatcacaaatataaagtctaatcaaattgaagttttaccaataaaccaattagatattgacactgaattaccagttgatgtaacgatttgtagtggtttaataaaagctgataaatatgaatggttgcttcaaaaaagtacagaattaggtgccaatcattttatttcagtgggtatggatcgatctgtagttaaattacaagagaacaaggtacaaaagaaaatagatagatggcaaaagattgtaaaagaagctgctgaacaaagttatagacttgttattccagatgttaaatttcagtcgaatttaaaagtaatttatgataccataaataattatgactatgtgttaatagcatatgaagacgaagccaagcatggcgaaaaaagtcgatttaaaaatattttaaacaactttcaaacgaatgatcgtgtgttaatcatatttggacctgaaggtggtttttctgataaggaaatcgatctctttagggaggtaagcttaaacgttggtttaggtcctagaatattaagagcagaaactgcgccactatatgcacttagtgctataagttttgagaaagaattgatggggtgaattaaatggcaacagtagcgtttcatactttaggttgtaaagtaaaccattatgaaactgaagcaatatggcaattatttaaagatgctaattatgaaagagtagattttgaaactaatgcagatgtatatgtcattaatacttgcaccgtgactaacacaggtgataaaaaaagtagacaagtcattagaagagcaatacgtcgtaatccggatgcagtagtatgtgttacaggttgttatgcacaaacatcttctgctgaaattatggagattccaggtgtagatgtcgttgttggtactcaagacagacataaattacttagttatattgatcaatttagagaagaacgtcaaccaattaatggtgttggaaatattatgaaaaatcgtacatatgaagaacttgatgtgccttattttacggatagaactcgtgcatctctaaaaatccaagaaggttgtaataatttttgtacgttctgtattattccatgggcacgtggtttaatgcgctctagagatcctgaaaaagtagttgaacaagcaacacaattagttcaatctggatataaagaaattgtattaactggtattcataccggtggatacggtcaagatttaaaaaattataatttagctcaattactcagagatcttgaggaaattgatggtttagaaagaattcgaatttcttcaattgaagccagtcaacttactgatgaagtcattgacgttctaaaaaattctaataaagtagttagacatttacatgtaccattacaatcaggttcagatacagtattaaaacgtatgcgtcgcaaatatactatggaacatttttctgaaagactaacaaaattacatgatgcattacctgatttagcagttacaagtgatgttatagtaggtttcccaggagaaactgaagaagaattccaagaaacatatgattttatagttaaacataaattctcagagttacatgttttcccgtattcacaacgtattggtacacctgctgcacgtatgggtgatcaaattgatgagtcaattaaaaatgaacgtgtgcataaacttattgctttaagtgatcaacttgctaaagaatacgcatcaaaatttgaaaatgaagttttagaagtgattccagaagaagtaggggaaacaaaaaatacattagtaggttacgcagataattatatgaaagttgaatttgagggtagtgaggatttaatcggtgagattgttaaagttaaaattaataaagctgattatccaattaacattggtagtgcagttagaatcgttaatcatgctactaataaaactgaagaaggcatattattataaatttttgaaattataaagatttataattgaccataattatttcatatattatactaattaaagcatagttaattatttctatgcaattattgactttaagtttcgttgatatttggagggagggaaatacagatgtctaaaacagtagtacgtaaaaatgaatcactagaagatgcattacgtagatttaaacgttcagtatctaaaagtggtacaatccaagaagtacgtaaacgtgaattttacgaaaaaccaagtgtaagacgtaagaaaaaatcagaagctgcacgtaaacgtaaattcaaataattaatagctctgttgactccctcaacatgaatgttaattatatatatcctctcaattagttaaactaattgagagtttttttatataattgtaatactataatatagtatttatttcatgtataatttaattgagagcgaggtgagataatgataagtataagtttgatacatatcgagaatacttttgcttcattgaatcattcatggttgaatcatatgtcaaatatcattgttaatcctattgttttattaattcttacatgtattatctttttaggttttttatatcaactttattctaaaaggataaatattttaggtattttagcttctctagcgttacttattctatttctaggatttttaattagtggcgatgtcaatttgatttcgattttattgtttttcataggtatcatcttactaataatagaactattcgttgttggagcagtcattggaattataggaatagtgcttattattgttagtatgattatgttaggagataatattttagttatgctctttaatgttattgtcgctttaatattttctattatagaatgggtgattttggtgaaagtatttaatcgcaaaataccattttttgataaagtggtattgaatgattcaacgagtacagaagctggttatagatctcatgatgatcgttcttacttagtgggaaaaactgcgtatactactactgatttaagacctgctggaatcataactttagatgacaaaagaattgatgctgtttctgacggtacatttatcctgagaaataaaaaagtaaaaattttagaggtagaaggtagtagagtagttgtaagagaaataaaaatataaaaggagtaaaatcaatgttaaatattggaattataattattgcgattattataatagttgcgttattgttattattttcatttgtaccagtcggattatggatttccgctattgctgcaggtgtaaaagttagtattgctacacttgtaggaatgcgacttcgtagagtatctcctcgtaaagtgataggtcctcttattaaagctcataaagcaggattaaatttaacaacaaatcaattggaatctcattatctagctggtggtaatgtagatagagtagtggatgccaacatagcagctcaacgtgcagatatcaatttaccttttgaaagaggtgccgcaatagacttagcgggacgagatgtcttagaagctgttcaaatgtctgttaatcccaaagtaatcgaaactccctttattacgggtgttgcgatgaacggtatcgaagttaaagctaaagctagaattacagtaagagctaatatttctagacttgtaggtggttctggagaagaaacaattattgcacgagttggtgaaggtattgtttccacaattggttctagtgaacatcatacacaagtacttgaaaatcctgataatatttctaaaacagtattaagtaaaggattggattcaggaacagcatttgaaattttatcgattgatattgcagatgtagacatcggtaaaaatatcggcgctgatttacaaacggaacaagcactcgcagataaaaatattgctcaagctaaagctgaggaacgacgtgctatggctgttgcctctgaacaagaaatgaaagcacgtgttcaagaaatgcgtgctaaggtagtagaagctgaatcagaagtaccactagcaatggctgaagctttacgtaaaggtaatatcggagtaaaagattactataatttaaaaaatgtagaagcagatacaggtatgagaaacgctattaataaacgtaccgaacaaaatgacgatgaatcaccaaattaaatagaggggtgattaaatgaatattggaattcttatattcgttatttctgtgattgttactggtattagtgcaatgagagataaaagtcatgaacaacgaaaaaatcaaatgcctccacacaaaaatacacaaagtcctacgcaaaacacaccaagaaaaaaaggtatttttgaacagatagaagaagcttttaatgagatggcatcagaatttgatgaagaagaacaaactaaaaaaacatcatcaccaaaaccatcttctaaaaaagaaacggttcacagtgataaaaatctaaaaaaaaatgttacgcctgaacatcatcgtggagaatcaaaacggtttgaaactaaacaatctcacaccggaaaagtgccttctaaagatagatattcaacttcacgagagagatctcaaagtgaaaaaaatattaaaaaacagttagaagactcgctatcaaaagaattatttaatgtgaggtctgaaattgacagggaaaaagaaaaacaactttctttaattgaaaagaaagctaaagaaattattaatgataagtatttatctgaaaaaacgaaacgttataaactgaatcaactactcaatagtaaatctattgagaaaaatatgacacatcaaacgtttcaatttgataatgatccaatagttgatggaattatttggcaagaaatattaaataaacctaaaaaattataagaggttataaataaaaaaataagacaagattcattgtttcattctgacctctataagagactttctacgtgaaagtctctttatttatgttcctaataagttaagacgcccctaaaactcatagtgttcttggtacttttttgttatgctatattatcttaggttaattattcattcaaaacatttaaatttgtatactttatcattgtttagtaaaatttatatgaaagattaattattaatgaatatgttttatgtgaaaaggagcgcttttatgccaggaataattcaaatagataacatcaatcattctcaagctttaattggtaataatgatgaacacttaaagtcgattgaagaagcatttgatgttatcatacatgctcgcgggcaagaaattgcagtaaaaggtcaagtattagagcatgttgaaaaagcagaattagttcttaaaaatttattaaaggtaattgagttaggacattcaattacattaaaggatgttgaggctgccataaagatggctaaaaatgatactattcaatatctattggatttatatgatgaagagattactaaagatgcctttggtaaaacaattcgtgcaaaaacaatggggcaacgtctttatattaatgctatgaaacgtaatgatttggtatttggtataggtcctgctggaacaggtaaaactttccttgcagttgtttatgctgcaaaacaattaagaaaaggaactgtaaaaagaattgttttaacaagaccagctgtagaagctggtgaatcattaggtttcttaccaggagacttaaaagaaaaagttgatccatatttaagacctctttatgatggtttaaatactgtcctaggtagagaacaaacagcacgatttattgaacgaggtacaattgaaattgctcctttagcgtatatgaggggtagaactctagatgatgcatttgtcattttagatgaagctcaaaatacaacacatgcacaaatgaaaatgtttttaactcgtctaggatttggttcaaaaatggttgtaactggagaccaaactcaaattgacttaccaaaaggtgttaaaagtggattaaaagaagctattaagaaccttcgtggtgttaaaggaataaatattatggaactagatcaaagcgatgtagtacgacacccattagtaagtaaaattatcgaacgttatgaaggagacaattaaatgtttacgattgatttcaatgatcatacaaacttagttaaaggtgaatggtatcatcaaattgaagacttaattaactttgctaaagaaaaagaaaacattcatgaagatgctgaattgtcagttacttttgtagataaagatgaaattcaagaaataaataaaaattatcgagataaagataaagtgactgatgttatttcttttgcacttgaagaagatgaaccagatattattggtttagatattcctagagtattaggagatattattatttgtactgatgtagctaaggaacaagctgaatcttataatcattcatttgaaagagaacttggttttttagctttacatggttttttacacttattaggttatgatcatatgaatgaagaagatgaaaaagaaatgtttggacgtcaaaaagaaattttaaatgcatacggattgactagagattaaatttttaaaacgatttaaatacacctttgatggtttaaaaacacttcttcaaaaagatcacaattatctaatacacttaatcttcgcattcatagctatcattttaggaattatcgtaagactttcaactgtagaatggttgtttgttttattaagcatcactttggtacttacgcttgaagctgtgaatacggctatagaatgcgtcgtagatttagttacttctgactatcatgaattagctaaacaagctaaagatattgccgcctttagtgttatggttgtttcaatctttgcactaattataggtttaattatttttatacctcccatctttttttaaggggacaataaaatgagttatcaatcacattattttcaagaagttagaaaagctcaacaacgtgcttatgtaccgtatagtcattttaaagtaggtgcatatttaaaaacaaaagacggtcgtcatttttatggagcaaatgttgaaaatgcagcttatccagcaacgatttgcgcagaacgatctagtttagtagctgcaatttcagaaggctatcgaccaggagattttgaatcaataacagttaccgttgacgctgaacatccgtcatcaccttgtggaacatgtcgtcaagtattaaaagaactctgtgatgacgacatgcctgtgtatatgacaaatcataaaggtgagatgattaaatcaactgtagtagaactattacctcacggcttttcaggaaaggatttagaataaatgacagaacacaaatcaggatttgtatctattatagggagaccgaatgtgggaaaatccacatttatgaatagagtcattggacataaaattgcaattatgtcagataaagctcaaacaacaagaaataaaattcagggagtaatgacaagagaagatgctcaaatcattttcttagatacaccaggcattcataaacctaagcataaattaggagattatatgatgcgtgtagctaaaaatacgctatcagaaatcgatgctattatgtttatggtaaatgtaaatgaagatattggtcgtggtgatgaatatataatggaaatgctgaaaaatgttaaaacaccggtatttctagtgttaaataaaattgatttagttcatccagatgcacttatgcctaagattgaaaaatataaaacctatatggattttactgaaatcgtgccaatttcggcacttgagggattgaatgtggatcattttatcgatgtacttaaagattatttacctgaaggtccaaaatattaccctgatgatcaaatatcggatcatccagaacaatttgtagtaggcgagattattagagaaaaaatcttacatttaacaagtgaagaaatcccacatgcaataggggtaaatgtagacagaatgattaaggaaagtgaagaaagagtaagaattgaagcaactatttttgttgaacgtgattctcaaaaaggaattgttataggtaagggtgggaaaaaacttaaagaagttggtaaaagagctcgacgcgatattgaaatgcttctcggatcaaaagtttaccttgaattatgggtaaaagttcagaaagattggagaaataaagtaaactttattcgtcaaatgggatatgttgaagatcaagattaacgtttaaattaataggaaagccggtgagatgcattgttagaaaaacaaaaaggaattatcataaaatcagtagattatggtgaatccgataaaattattacaatattaaacgagcatggtgctaaaattcctattatggtaagacgtgctaagaaatctaaaaccggcttgcaagctcatacacaactctttgtgtatggcttatttatttataataaatggaaaggtatggggacgctcagttctattgatgtcataaaccaatattatcaattacgattagatatttttgatagtagttatgcgactttatgtgtcgaagcaatagatcgatcattagaaccagatgaagtttctctatatcattataagttattagaatttgtactcaataaaatttcagaaggtaattctgctcaattaatgtcgattatcgtattattgaaatgtatgaataaatttggttttggcgcatttttcaattattgtgcaattactggtgatactgatcaatctaagcttattgcttacagttttaaatatgacgggacaatctcagaaactgtattaaataatgatccttatgcattaaagctatccaataaaacattttatttattggatattttacaaaagttgccaattgataaaatgaatcattttaatattaaccaaactttattagatgaaatgtcagaattaatgataatgctgtataaagaatatgctggcatgtactttaaaggtcaaaaattaattaatcaacttaagcgattagaataatatacaatgtttaaattaattaaagaacccacttattactcatagcaagtaataagtgggttcttgttatattaaaacttaactttttcagctaagaatgtttctaattctgagattggcatacgaacttgttccatagaatctctatcacgtactgtaacttgattatcttctaatgaatcgaaatcaaatgtaatacagtaaggagtaccgatctcatcttgacgacgataacgcttaccaattgattgtgattcatcaaaatcaacagaaaacttagaacttaattgttcaaagattttaattgcttcttcagataattttttacttaatggtaaaatagcagctttatatggtgctaaagcagggtggaaatgcattactgtacgagcatctttactaccttcaacgccttcttcatcataagcatcacataagaaagctaatgtaacacgatctgcccctaaagaaggttcaatacaatatggaatatatttctcatttgtttctggatcatgatatctgaaatcctcgccagaatgttcactgtgctttttcaagtcaaaatcagtacggcttgcaataccccataattcgccccaaccaaatgggaatttatattcaatatctgtagtcgcattagaatagtgagataattcttcttcatcatggtcacgtaatctcatattttcttcattgatgtttaaatcttttaaccattgacttgcaaatgttttccagtaattttgccattcaatttcttcaccaggtttacagaagaattctaattccatttgttcaaattctcttgttctaaaaataaagttaccaggcgtgatttcattacggaatgatttaccgatttgaccaataccgaatggtaattttttacgcattgaacgttgaacgtttttatagtttacgaaaataccttgagcagtttctggacgtaaaaatagttcattagtagagccctcagtaacaccttggaatgttttaaacattaagttaaattgacgaatatctgtccaattagtagtaccacttactggacatacaataccttcatcatcgatgatgcgtttcatttcttcaaaacttaagccatcagcaatgaaattttcatcacctttttcattttgcatatagtcttcgattaatttatctgcacgatagcgaattttactatctttattatcaatcattgggtcattaaaattacctaaatgaccagatgcttcccaagtttttggattcattaaaattgcagcatcaatcccaacattgtatggtgattgagtaatgaatttttgccaccatgcttttttaatattattttttaattcaacacctaatggaccataatcccatgtattagataaaccaccgtaaatatcactacctgggaatacaaatcctctatgtttagctagtgatacaatagtatccatatctttaaccatattatctctccttttaaaataaaaacgtcccaagacaataaataaatataaaacaatacttattattatcttgggacgagttaataattcatctatataaatatatagtgttaacaaaataacccgcggttccacccaaattagtgtagacactcgcttttatgtaatgatattgataagccaatttttaaaatgttaagcttccaccaaccttaactcgcttaatcatattttaattcatagaaaatttaatagcaaggatttatatgtatttgtaggtatatatataaataggtataataaaacatgaaattaaaaggggtgaagacctatagaattaagtaaaagacaagaacaaataattgaaatagttaaggatggtggcccgataacaggtgaacatatagcagataagcttaatttaactcgtgctactttacgtcctgatttagctattttaactatgtctggttttattgaagctagaccacgtgtgggttattattattcaggtaaatccaagaataaattaatcagtgatcatttacgtcaatatataataaaagatcatatgtctctacctgttatcgttaaagaagatacgacaatttatgatgctatatgtactatatttttagaagatacaggaacattatttattactaatcaaaaagatgaattgattggtgtgagctcgcgaaaagatttgttacgtgcctctatgattggtcaagatattcatactatgcctataagtatcatcatgtcacgtatgcctaatattgtttatttaaaagaagaagacctcgtcatctatgctgcaagtcaaatgatagataaggaaattgattcaattcccgtcgttagaaaaaaagaaaatagtaaatataaagttgtaggtagaatatctaaaacaacaataacaaaattatttgtttcattatttaaagaataggtgataaacaatggaaaatataaagataatcattgcatctgattcaataggagatacagctgagttggttgctagtgcttgcgtcgctcaatttaatcctaaagcttgtaaacatggttttttgagatatccttatatagaaacctttaaggatatagatgaagttatacaggtcgctatagataaaaatgcaattattgtatatacgttagtagaaccagaaattaaagcatatatgaagaaaaaagtagacgatttctctttaaaagctgttgatataatgggtcctctaatgacactacttaatcaaacgcatgatgaggagccgtataatcagccaggcagagttcataaattagacgatgcctatttcaaaaaaatagatgcaatcgaatttgcggtaaaatacgatgatggtaaagatgcgaaaggattacctaaggcagatattgttttaattggcatttcaagaacttctaagacgcctctatctcagtatttagcgcacaaaagctataaagtaatgaacattcctctagttccagaggtaacgccaccagacgaattatttaaaattaatccaactaaatgtatagcattaaagattagtgaagataaacttaatttaataagaaaacaacgacttaaacaattaggattaggtgaacatgctagatatgcgactgaagatagaattaaagaagaaattcaatattttgaaaaaattgtcgaaaaaataggatgccctgttattgatgtatctgataaggctattgaagaaacagcaaatgatgttatacaaattattgaaagtaaagcataaatatttaaaaaccttttataaaagtgtataatattatgactactatttaataggtgatatatattgcgtatagaacagtctgtaattaacgaaataaaggaaaaaacagatattttagatttagtaagtgaatatgtgaaattagaaaaaagaggacgcaattacattggtttgtgtccttttcatgatgaaaaaacaccttcttttacagtttctgaagataaacaaatatgccattgctttggttgtaaaaaaggtggaaatgtttttcaatttattcaagacattaaggacatttcattcgtagaagcagtacaagaacttggagaacgcgttaatataaaagtagatattggtcattctaatccctctacaactcaaatagcatctgaagacttaaaaatgattgaaatgcatgaattaattaatgaatattatatgtatgcattaatgaaatcagtagaaggtgaagaagctttaaattatctcgtaaatcgtggtttcactgaagaattaataaaatctcgtggaatagggtatgcccctaataacgctcacttttgtcatgactttttaaaacaaaaaggatatgacatagaactagcttatgaagctggtttgttatcacgtaacgaagaaaattttagttactacgatcgttttagagatcgcatcatgtttcctttaaaaaatgctcaaggaagaattgtcggtttttctggtagaacttataacaatcaagaacctaagtatttaaatagtcctgagacaccgatttttcaaaaaagacgattactttataatcttgataacgcaagaaaatcaattagaaaaaatgatgaagtaatgttgttagaaggatttatggatgtaattaaagctgattacgctggattaaaaacagtggtagcaagtatgggtacagcattatcagaagatcacatgacagttttaaaaaaattaacctctaatataactttaatgtttgatggagactttgctggtcaagaggccactttaaaaactggagaacatttactgaaacatggattaaatgtatttgtagtacaattaccaaaaaacatggatcccgatgaatatatagttaaattcggtaaagaaaaatttatagaatttttaaataatgagaagaaatcgtttattatttacaaagttcaattctatcgagaagaaattgaaaataatgatctagcttatgagcgtcactttaaagagattactgaagatatttcatttgtcagatcttcaatattaaaaaataaaattgtgaatgacgtagctgacattttcaatattgatgccaatactattatgtccaatgtacatcaacaacctgaatttatctcatatgaagaagactatattggaaataccaatgataactcgaattcaaatactcaaaatttaaacatcgtttttacacatttaaacaaaagtgaaaaagcacaaagagctttattaaaacattttatgatggataaagatgtatttctaaattataaccgacaacttgaagcaaatgattttacgaataaatattttcaaagtatttttaaagcgctaaccgattattattctgaaaatgattactattcgataagtgatttaatattatacattgaagataaagatattagagaagcaattatacagcttgatgattatgaattaaatcgagaaccttatgatttagaaattgaagaatatatctcaaccttaaatgaaaacaaatatgaagattctattgaagaacttaatcataaattaaaagaagcacttagaattggtgacgtagaatctcaaaaatattatttacaaatgatagttgataaaaataagcaacgcatgtagatgaacatttatatttaataaccattactgtataatggttattatgcttttttaaagggtagacaaatagtaagttaaatatttatgaaataaggataccatttttattacctatagaatgataatatttcatgtttattataaaatatacttttcttattataataatttattatataattaaatatcttaattgaaagcttaaaatacgattgggaggccttttcatgtctgataaccaagttaaaatcaaaaaacaaacaattgatccgactttaacattagaagatgttaaaaaacaattaattgaaaaaggtaaaaaggaaggtcatctaagtcatgaagaaattgctgaaaagctgcaaaattttgacatggattccgaccaaatggatgatttctttgaccaactaaatgataacgatattagtttagtaaatgaaaaagatagttcagatacagatgaaaaattaaatccaaatgacttaagtgcgcctccaggtgttaaaattaatgatcctgtaagaatgtacttaaaagaaattggacgtgtaaatcttcttagtgcacaagaagaaattgaattagctaaacgtattgaacaaggtgatgaagtagcaaaatctcgccttgcagaagccaacttgcgattagttgtaagtattgcaaaacggtatgttggtcgtggtatgcttttcttagacttaatccaagaggggaatatgggtcttatcaaagcagtagaaaagttcgattttagtaaaggatttaaattttctacttatgctacgtggtggattagacaagccattacacgtgctattgctgaccaagctcgtaccatccgtattcctgtgcatatggttgaaactattaataagcttattcgcgtacaaagacaattattacaagacttaggtcgtgatcctgctcctgaagaaattggtgaagaaatggatttaccacctgaaaaagttcgcgaaatacttaaaatagctcaagagccagtatccttagaaacgccaataggtgaagaagatgacagtcacttaggagactttattgaagatcaagaagcacaaagcccttctgaccatgctgcttatgagttattgaaagaacaattagaagacgttttagatacacttactgatagagaagaaaatgttttacgtttaagatttggccttgatgacggacgaactagaacattagaagaagtgggtaaagtgttcggtgttacaagagaacgtattcgtcaaatcgaagctaaagcgcttagaaaattaagacatccaagtcgtagcaagcgtcttaaagattttatggactaagattaatggtgaatctgagttaacgatagatgttatgtataaagaaacttgaggctaagacaatactatgtcctagcctctttttataataaaggagataacaatgatatcattaaatcatcgattaaaagttgtaagccaatacttattaagtaattcattagctgatatcggttctgatcacgcttatttacctatttatgcattacaacgtcatctatgcgatgatgctattgctggcgaagtaatcaaaggaccttatacagctgctaaaaagaatgtagcacagcatcaacttactcaacatatcgatgttcgattaggtgatggtcttagtatactaactgagaaagataaagtagataatatcacaatttgtggaatgggcggacctttaatagcgaaaatattagatgaaggtaaagataaacttgcacatcatccacgtctaattttgcaaagtaatattcaaactgaaaccttacgcaagacacttcaacatcttaattatgatattatcgctgaagaaattttagaagaaaaaggacatatctatgaaattgtagttagtgaatggaaagaaaatcttaatcttcttaataaaaaatcacttaaatttggtcctattcttttaaataataaaaacggtatttttataaaaaagtgggaaagagagttagcagctttagagcatattcgtaatcaattgaatccaatacaacatcgtgagagactagaagagattgaagaagagatatcaatgataagagaggtactctataatgaaaattaaagaactaatgtcaattattgaccaacacgttccccttaaaactgctgaaagctgggataatgtgggtttattaattggagatgacactaaagagataacaggtattttgacagcattagattgcacaatggaagtaatagaagaggcaattagcaaaggatacaatacaattattgcccatcaccctttaatttttaaaggtattaaatcattagttaatgatggatatggtaaattaatacacatgcttattcaaaatgatattcaacttattgctttgcacaccaatttagataatcacattgatggtgtcaatgagatgctagcaaaaaaattaaatttaactaatattagatttttaaatgaagaagaatcattttactataaagtacaaacttacattcccgaagaaaatctagaatcatttaaatatcatattaataatattggtttagcaaaagaagggaattatgaatattgtttctttgagtccaaaggtaaaggtcaattcaaaccagttggagaggctcgccctcatattggagaactaaatcgaattgaatatgtaaatgaagtgaagctagaatttatgattcgtaaagatcaattaaatattgctaaaaatgcaattattaattaccatccttatgaaacacctgtatatgattttattaagatgacgacatctgctaattatggtcttggaaaaataggcgaactaaatgagccgttaaatttagaacattttgctaaatatgctaaagcacatttaaatattcctagcgttcgttatacaggtccttcagaagcgttaattaaaacagttgctattatcggaggtgctggtatcggttttgaaactagtgcttttaaaaagggagcagatgttttcgttactggagacataaaacatcatgatgcacttgatgctaaaactaatggcattcatttattagatatcaatcattatagtgagtacgttatgaaagaaggacttaaaggcttactaggacaatggttatttagtaatgagagtaagcagcttaatatagaagcttcagaaataaatacagatccatttaattatatttaaaactatacaaaggaggtcagatgaatggctaatcatccatttgaaatatttaatttaaatacaaatcttattgatgcagttaaagatttaaattttaataaacctactgaaattcaaaatagaattattccacgtataaaaaaaggaaccaatttaattggtcaatcacaaaccggtactggcaaatcacacgcctttttattacctttaatagatttaattaatactgacattaaagaacctcaaagtattgttgttgcaccaactcgtgaattaacacaacaattgtataaagtggctagtcatctagctagttttcaatcagatattaaagtaagtttatttattggtggtactgacatagagaaagataaacaacgaacaaatcaacaacctcaattagtgattggtacaccaacacgaatcaatgatttagctcagagtggacatttgcatattcataaggcatcatatttaattatcgatgaagcagatttactcattgatttaggcttaatagaagatgttgattatattgctgctcgtttagatgaaaatgctaatattgcagtctttagtgcaacaattccaaaatcattagaaccgtttttaaataagtatcttagtcaccctgaatatgttgtagttgataacaaatcccaaaataaaaaaaatattgaattttatttgattcctactaaaggaactgaaaaagttgataaaactttgcaattaattgatatactaaatccatatctatgtattattttttgtaacagtagagaaaatgcaaatgaacttgctcaatctcttaatgagtctggcattaaagttggtatgattcatggcggtttaacaccaagagaacgtaaacaacaaatgaaacgtattcggaatttagatttccaatatgttattgcaagtgatttagcttcaagaggaattgatattgaaggcgttagtcatgtagtgaattttgatgttcctaatgatattgatttctttactcatagagtgggtagaacaggacgtggaaattataaaggcgtggctctaacattatatagcccagatgaagaacataatatttctcttattgaagataaaggctaccactttgataatgttgatattaaaaatggagaacttaaaccaatcaaagcgcacaatacacgtcataaacgcgaacgtaaagatgatcatttaacaaatcaagtaaaacataaagtaagaagtaaatctaaaaataaagttaaaccaggttataaaaagaaatttaaacaagaagtagaaagaatgaaacgacaagaaagaaagcaatacagtaaacaacgtagtagacaacaacgaaaaaacaataaaaaaggttaggtgaaacaaatgttaattggctcacatgtatcaatgagtggtaaaaaaatgttagaaggatcggccgaagaagcacatcaatttggtgaatcaacatttatgatttatacaggtgcacctcaaaatacaagaagaaaaagtataaacgatttaaatattgaaaaagggcataaagttatggaacaatatggtttatcaaatattgttgtacacgctccttacataataaacataggaaatacaacgaaacctgaagtttatgaattaggtgttaatttccttcaaaatgagattgaacgtacgcaagctttaggagcgaaagatattgtcttacatccaggtgcacatgtaggtgctggtgcagataaaggaattaatcagattattaaaggattaaatgaagtgttaacacatgatcatgatgtacgaattgcacttgaaacaatggctggaaaaggaacagaaattggacgtagttttgaagaacttgctcgcattattgatggtgtgacacataacgatcggttatctatttgcttcgatacctgtcatacacatgatgctggttataatatcaaaaatgattttgatggcgttttgaatgagtttgataaaattattggaatagaccgtattaaagttgttcatgtaaatgatagtaaaaatgaacaaggtgcacataaagaccgacatgaaaatattggatttggatatattggttttgatgccttgaataatgtggtacatcatgaagcttttaaagacattcctaaaatccttgaaactccttatgtaggagaagataagaaaaataaaaagccgccttatcgctttgaaattgaaatgttaaaatctcaaatttttgatcctaaattaaaagaaaaaatattgaatcaataattaaaataagagtaagatagcataatctacaaagagactatcttactcttattttaattcgtaaacattactatttacaaaaaacatatataattgtatagtatttagcgaggtgaaaagatgaatcaacctgtttttgaattaaaaaatattgattattattttgataataaacaagtattagaaaacattaatatccgaattaatagaggtgactttcttgcaattgttggtcctaatggagcaggaaaatctactcttttaaaggttattcttggcttattaccattacaacgcggtgaaatatacattgacgggaaatcttataaaaaaaatactcaatctgcattaaaaattagttatgtgtctcaaaaagccaatgcttttactgcaggatttcctgctagtgtgaaagaagttgttttaagtggtttaactaaaacgaaaagaatttttcagtggtttaataaaaatgatgaacaacaagtagataatgtcttacatcgtttaaatattcatcatctaaagaataaaaatattgcagaattatcaggtggacaacaacaacgtgtactaattgcacgcgctttaatttcaaatccatctgtcttagtattagacgaaccgacaaatgggattgatgcaaaacatgtgaatgaattttatgccaccttgcaacatttaaaagaagaaggtataacgattattttagttactcatgatataggcgttgtggtagacacagctacaaaagtcgcttgcttaaataaacatcttcatttccacggttctactgaagaatttaagtctcttgatgaagttgaaatttcaaaaatatatggtcatccaattaaatttgttgatcatcaacataatcgttcatgctgtgaaacataattttaaataggagttaattatgataagtatatggattaaattaagaggtgaatatcatgattgaagcattgttaaactttgattttatgagatattcacttttaagtgggatattgattggttttattgcacctttaattggtgcatttatagtggtaaggcgattatcattaattgctgatgctttaagtcacgtcacactaggcggtatttcgtttggaatgtttattattaccttatcaccagtattagtatttataaaccctatgtggtttggtataatctttgcaatagttggagctttacttatagaaaaattaagaacttcgtattcaaactatcaagaaattgcaattccaattataatgagtgctggaattgcattaagcgcaatttttatttctctagctgatgggttcaatcaagaaattgttggattattattcggatcaattagtgctgtaaatttaagtgacttagtcacaattacgatcatttcaatcgtcgtattattattcattcttttattatacaaagaattatttattttatcttttgatgaggaatatagtaaggttattaatattccaaaatggattcagtttttatttataaccattgttgctatggttatttctgcatcaatgagagtagtaggaattttacttgtgagtgcattaattacattacctgtggctatagcaatgcgattaactaaaggatttaaacagttgattatcttaagtattattataggtgaatgttctgtcattctaggacttaccttagcattttatattaatatatctcctggtggtgtcatcgtggtattattagttctaattttaggaataacgatgttactacagaaaactaaacgaactgccaaaaaggagcattaaattatgaatacaaacgacgctattaaaattttaaaagacaatgggttaaaatatactaagaaaagagaagatatgattaatatctttgttaatgaagataaatatattaatgctaaatatatacaacaacaattagacaatgattatccaggtatatcttttgatactatttatcgtaatcttcatctttttaaagatttaaatattgttgaaagtacagaattagatggagaaatgaaatttagaatcgcttgtactaatcaccatcatcatcattttatatgtgaaaattgtggagatacaaaagtaatagatttttgtccaattgagcaagttaagcaatttctacctaatgtagatattcatactcataaattagaagtatatggtatatgtgaaacttgccatgataaaggtataaattaaaatgagatatgttctgagacgtaaataagcgtctcagtttttttataggtcaaaagtctgaatttttactaatattgaaatataatgtttaaaaactactaaaatgagatataaaaagagtataataagaaatatgacaactatgtgaataatatttaaagcaaatgatttgttgtacatcatatagcttgttatgatttatgtgaagataatttaggaggatgattatttatggcttttgaattaccaaatttaccatatgcagcagatgcattagaaccacatatcgacaaagaaacaatggaaattcatcatgacaaacatcataacacttatgttacaaaattaaactctgcagttgaaggtactgatttagaatctaaatcaattgaagaaattgttgcaaatttagatagtgtacctgaaaatattcaaacagcagtacgtaataatggtggaggtcatttaaatcactcattattctgggaattattaactcctaattctgaagaaaaaggtactgtagttgataaaattaaagaacaatggggttctttagatgagtttaaaaaagaattcgctgataaagctgcagcacgttttggttcaggttgggcttggttagtagtaaataatggaaaattagaaattgttactactccaaatcaagataaccctattactgaaggaaaaactccaattttaggcttagatgtttgggaacatgcttattatcttaaatatcaaaataaacgtccagattatatcagtgctttctggaatgttgtaaattgggaaaaagtagacgagttatacaatgctgctacaaaataataaataaaaaaagtatttattagtgatctctttttaggagatcactttttttatgaaaaatatagaaaaattatacaatttcatatatcatttataagtatacatgattaataattgaggtcggttgtcttgcttaaaagattaaaagaaaaatcaaatgatgaaaaaataaaacatacgatgaataaacgaattcgttttatatttggtgcaattgttttgattttcgtattaattgtcctaagactaggatatttacaaattgcacaaggtgcacattatagtcaattagtgaaaaatgatgagaatattactgtcaatgagtccgtaccacgaggaagaatactagatagaaatggcaagattttagttgataatgcttcgaaattagcaattacctacacgcgttctagaaaaacaagtcaacaagacatgttaaataccgctaaaaaattagctaaactcattacaatgaatactgataagattacaaagcaagataaacaagacttttggatacaaaatcatccaaaagaagttaataaattaatgaaaaaagaaacaactatgcttaacaatggtagcataagtcaagaacagtatgataaacaattacatagtaaaattaaaaatactcaattaaatagtttatctaagcatgatttacaagtgttagctatatatagagaaatgtcatctggatctacacttgatccgcaaatgataaaaaatgaagatgttagtgaaaaggaatatgctgctgtttctcaacaattggataatttacctggtgtcaatacttcaatggactgggatcgaaaatatccatatggtgaaactttaagaagtatatttggtagtgtttctacaccttctgagggtattcctaaagaattaactgaacagtatttagcaaaaggatattctagaaatgacagggtagggaaagcttatctagagtatcaatatgaagacattctacgtggtaaaaagaaacagctgaaatacactactgataaatctggtaaagttattagttctaaagtgattaaccctgggtcacgtggaaatgatttacaactaacaattgacattgatttacagaaaaaagttgagtctctgttagaaaacgaaataaaaacactgcgtagtcaaggagcaaccaacatggacaatgcgcttgtagttgttcaaaatcctaaaaatggtgatattcttgcaatggctggaagacaaattgataaaaatggtgaactgctagattatgatttaggtaactttactggccaatttgcagtcggttcttctgttaaaggagcaaccttattaactggttatcaaaatcatactatcaaagtcggtgaagaaatgattgatgaacctttacactttagaggcggactaactaaacgttcttactttaaccaaaatggcaaagtcctaattaacgacaaagaagcattaatgcattcttcaaacgtatatatgtttaaaactgctttaagactagctggtgatccttactcaagtggtatgagtttacctaataatattgaagaagctggtcaaaaactaagaaaaggtctaaatcaagtaggattaggtgttaaaacaggtatcgatttacctaatgaaacaattggtcaaattgaaccattaactaataatccaggcaattatttagatttatcaataggtcagtatgatacttatacacctattcaactttcacaatatatatctacaattgcaaataatggttacagagtacaaccgcacattggtttagctatacatgacgcaacaaatagtgatcaagtaggaccggtaaaagataaaattaaaggtaatatactaaataaagttaataattctcaagatgagatagatgaagtaaaacaaggattcaagatggctttcaatgaaaaagatggtacaggctatgcaagcttccataaaactgttgttccatcagctggtaaaactggtactgctgaagtttatcaaaatggacaatctagagttaactcaacatatataggttatgcgcctattaaagatcctaaattagctttttctatcgtatatactaatcaacctgttccaccaccatggttaaatgggggagatttaggaagagatatcattaattactactttaaaaatgaaaaataattttaataaccgttgataagatgcttttctacttaatactagtaaaaattaatacttttcaattaatcgtctaagtggtatgataataaagtcgtatttagaaaaggtaaggaggtataatcatgcgcgtaaacgtaacattagcttgtactgaatgtggtgacagaaactacattactactaaaaataaaagaaacaatcctgaacgtattgaaatgaaaaaatattgttcacgtgataacaaacaaactctacatcgtgaaactaaataatattaaaagtaaaaaaggttggaacaaaattgttccaaccttttttactttagtagatcattcaaccattaatcatcttaaatatataattagcaattatatttattttatatagattaatatattttttaacttaaaataatttgaattatcataaatgacatcactatataataacgttataatatattaaaggatgggagaaagaatgggtaaaaagcaaattagaaaaaatattttatcacaaatgaaagactttgataaaaaaaataagcgtaaagctgatatttggttaatgaaacaattaattgaaaatgaaaaatttaaaaaagcacatcgtatcggtatatttttgtctatgccacacgagattaatacatacaatattattactttcgctttagataatggaaaacaaatttttgtgcccgatacagattacagaagtcgtaatatgaattttaaacaactattagatttgtcatcaatagctaccgatgataaaggtattaattatgttaatgaagatacatctattagtaatgacatggacttacttattgtacctggaatagcttttcaaacaaatggttttcgtataggatacggaggaggttactatgataaatttctaaatcaacacgatattaactcgattagtcttatatatgacttccaaatatcagatttcgatgtggaaaaacatgatcaacctgtagataatttaattatatgtaatactaaatttgggaggaattaatgaatattgataaactatattggaaatcaatttattattggatcaaatattttaactataaattagaacacacagataaaaatacaaatgaaatttggttatccaataagaaaaaagaagaacttattgtatttagaaaagaagtgagttcaactcaagagatacgcttcgacaaatctaaaataaatgatcataaagagaatttacaaaaaaagttaggatttaaaattaaaaaagtcgagttcttctactttttagaaacatcgatgaatattgatcatctcgatgaaatgcatcctactaagttgatttatcatagtatcactaatgaaaaagacttagaaaatacaatgcctaattttattttaaaaaagcgcattaataaaaaagaaaaaaaatcatcgttggattataaaaaacgtgtacttaatacgaatcttgttgataagtatatgatgatgttttcaccaatgacttatacacttatagctataaacgttctaatatggttatatatgaagatttatctaaatcatttttcagatattaagttactagatgttgggggattagtacacttcaatgtagtgcacggagagtggtaccgtcttattacctcgatgtttttacattttaattttgaacatattttaatgaatatgctatctttattcatttttggtaaaattgtagagactatcgttggtccatataaaatgttaggtatctatttaatttctggtttatttggaaactttgcttcgttatcctttaatataagtaccatatctgttggtgcaagtggagctatttttggtcttataggagctattttaacgatgatgtacttaagtaagacttttaataagaaaatgataatacaattgttagttgttgtattaatattgatttttgtctcgctatttatgtcgaacattaatttaatggctcatttaggtggtttcataggtggtttccttattacattaataggctattattttcatgagaaccgtaatttattttggttatttttaattttattattagtactttttgttttattacaaattagaatattttcaattaaagaggaaaatatttacgataaacttattaaagacgaaatgatatcttataattatgatgatgctttatcaattgttgaacatacaatcaataaaggatacgatgatgatgaaacatattacttaaagggtttaataactgctactaaaagttctaaagcagaagcaatggctgattgggaaagaggcctaagaagtcatcctaactctgcattactaaactatgaattatccatagctaatagagcattaaatgataacgataaatctttaaaatatataaaaaaagctttaaaaattgatggcaacaaccaaagctataaaaatttagaaaaagaattgaaagatagtaatgaatctaaaaattaacaatttttatgatgtcttgcaacttttgaaacgttatggttttattatatattttaaagataaagaagatatgtatgaaatgatgcaacaagaaatacgttctctttacaattatgatcttttatcaaaagaagaatatctaaaatgtattttaataattaatcaaagaaggaatgagcataaatgaaaaatattattttagcagctgatataggtggaacaacatgtaaactaggtatctttgatacgaaattagaacgattacataaatggtctattgaaaccgatacttcagaccatacaggtcgaacattattaaggcaagtctttgattcttttaaagaagcaactgaatcttatcactttgatcttcaaaatgttatcggagttggtataggagttcccggtcctgttgattttgaaacgggaatcgtacatggggctgttaatttacattggcctggaaatgtaaatgtgagagagatttttagtgaatttatagattgtcctgtatatgttgataatgatgcaaatgtagctgcactaggtgaaaagcataaaggtgcgggtcaaggtgcaaatgatgtagttgctattacacttggtactggtcttggtggaggtatcatttcaaatggtgaaattgtacatggtcataatggttcaggtgcggaaataggtcatattagaactgattttgatcaacgttttaattgtaactgcggcaaatcaggatgtattgaaactgttgcttcagctactggagttgttaatttagtcaatttttattatcctaaacttacttttaaatcatctattttatcacttataaaagaaaataaagtaactgctaaagctgtatttgatgcagcaaaagcaggagatcaattctgcatatttataacagagaaggtcgcaaatcatatcgcttatttatgtagtataattagtgctacaagcaatcctaaatatattgttttaggtggaggaatgtctacagcaggattaatattaattgaaaatattaaaacagaatatcataatttaacatttacccctgctcaaaaagatactgaaattgtccaagcaaaacttggaaatgatgctggtatcactggtgctgctggactaataaaaacatatataattgaaaaggatggtgttaaataatggctattgttgatgtagttgttataccagttggaacggaaggtccaagtgttagtaaatatattgcagaaatccaaatgaaactagaagaatttaaaaaacaaggtaaaattgactatcaattaacacctatgaatacgcttatcgaaggtgatcttaaagatttatttgaagtagttcaagcaattcacgaattaccatttgataaaggattaaatagagtatgtacaaatatccgtattgatgatagaagagataagtctcgtaaaatgaatgataagttaaaatctgttcaaaaacacttagataaacaaggtgagtaatatgagaatttctaatttatctttaggattagttgatacaaacgcatattttatagaaagcgataacagtgtattattagttgaccctgccggagaatctgataaaatatttaagcaattaaatcaaatcaataaacctttgaaagcaatattacttacacatgctcattttgatcatattggtgctttagatgatgtattatccaaatatgatgtacctgtttatatgcataaagaagaattttctttcttaactgatcctgaaaaaaatggttcttcaaagtttaaacaatatggtatgccactcactactagtaaagctcaaccaattgctttagatgaaggtaattttacaattgatgaatttaaatttaatgttattcatacaccaggtcattcaccaggaagtttaacttacgtttttgacgattttgcagtagtcggagatacattatttaataacggtattggaagaacagacttatatagaggagactatgaaacattagtagactcaattaaagacaaattatttgaattagacggagatttgcctttattcccaggtcacggtcaatacactacggtagatgatgaacaactcaatccatatttagatggacaataaaaaaagtaatttaaacacctcttacgtttatatatgtaggaggtgtttttttgaaattattatttcaagaaataattaataaagcaatttcaaaaaatgcaagtgacgtacactttattccttcagaggataaagtacatattaaattcagagtgaatgataggttagagacgtatgaaatatttagtaatgacatttatgaaaaattattaatttatatgaaatttaaagcaaatttagatgtatcaacacatcaagtagctcaaagtggtagatatacttatcatgctaaatcaatattttatttaagaatttctactttacctttgtcattaggaatagaaagttgtgttatcagacttatccctcaatatttcacttctaaaagagagtataaagactttaatgactttaaacctctaatgaataaaaagcaaggtctcattttacttactggtccaacaggttcaggtaaaagtactttgatgtatcaattagtactctatgcttttcaagaattaaatttaaatgttattacaatagaaaatcctgttgaacaattattaaaaggcataacacaagtgtcagtaaatcataaagctggtatagattatgttaattcatttaaagcaatattaagatgtgatccagatgttattttaattggtaaaattagagatgctgaagtggcaaaatgtgttattcaagcaagtttaagtggtcatttagtactaaccactatgcattcaagcaattgtaagggcgcaatactcagattgttagagatggggattagtgttcaagaaatttcacaagcaataaatgtcatttcaaatcaaagattagttacaactactttaaatcaaagaaagcttgtttgtgagtctattacaaataatcaaattcaatatttttttgaacataaccatacgcttcctgagacatttaataatttaaaagaaaaattgttatcgctatcgaaagaaggtcttatatgtgaagatgtggttgaaaaatatatttaacaaacattctaaagttcttagcgaaaaccaacaaattatacttctaaataatttgaataacttacttaaaagtggatttacattattagaatgttttaattttataaatttgtattttaattataaaaataaaaatatagcaaataagatagttaaaataataaaaacgggaggagaatgcgatcaaatattagaattaataggctatcctaaatctattatcactcaaattcaatttgcgcagaaatatgggaatataaatgaagcactagaggaagcaatgaattatttaaaaacaaatcttcaagctaaacaacgaatattaaaagctattcaatatcccattattttaattgcaatatttataactatgttaagtatattaaattatacagttttacctcaatttaaacatctgtattcaatgatggatgttaaactcaatttatcacaaactattattacatatttaattagtcatttaccacaaatttttctttttgttttttctactttactaactttatccatcattatatttatctttcttaataaattagatatatccaaaaaacttacattcatttcttacataccaattgtacgtttttattattcgactataaaaacatatcaacttgctaatgatttagctttattttataaaaatggtattagtattcaacaagtcgtagatatgtacattcatctacaaaacaactcatttttgaattatattggtatcgttattcaaaatgaactaaatagaggcattaatttacccaatattttgattaaaataccatgttatcaatatgatttaatacagtttattaagcaaggtgagaaaaacaataaattagatattgagttgaaaatgtattgtcaaatattaattcaaaggctccaacaaacagctttaaaacaatcaaaaatgatccaacctatcgtatttatattcttaggagcctttatattaagcttgtatctagtaatcatgttacccatgttccaacttatgcaaaatattaaataaagtaaaatggaggtttttatgaaaaaattcaaacataaattaaaagcttttactttaatcgagatgttacttgtactattaataattagtgttttactcattcttattattccaaacatagctaaacaaatggcacatattcaatcaacaggatgtgaagcacaagtgaaaatggtcaatagtcaaattgaagcttatactttaaaacataatagagttcctaattctattgagaacttaataactgaagggtttataaaacaagggcaatcatcttgtaagtctggagaaactatcagtattaaaaatggagaagcagttgcagagtaagagtattaaatcattcacttttatagagagcctattaatcattttgattttaacaatcttacttaatgcaacgttaagggtaaatgtatttaacaatatttctttgtcagacgatataaaagcaacacaatttgttaatcaattagaatattttaaatctaaagcgatgcgtaatcatcaatctattacattgttaatttcaaaacatttctcaattataaaagtaatagaagcacatggtggtcggtacaattacaatattgaagatggaaaaatagttgaagttaaaaatttagggaaaattacttttaataaagaaggaagaacaaatcagtttggctctttaatattgaaaattaatcaacatcaatataaattaatcattaatattgaaaaaggaagaattagatattttaaaatttaaagcagtgttactcatcgatagtttatttagcttatatatattcactactatagtttttactttaattccactactaatcagtttaaatcatacattaaaaagagaataccaaattgttgaaatcaagcaaaccataatgagtagtatcaaccattatgataaaaaaaccatttcaaaaggtataaatttaggtgattatcatattaaactttattccaataaaatatgtggacttcacaaagaaactgaaatcgaatcatgcgttaaatattaaattaaaatcgttcactttaatagaaatgttagtttcattatttttaacaacaatgatgttaacattttttcctcaattaattaaattgactcattcctatttatacgagtcatataatagttatcaaacagaatatgctttttttcagacaaatataactcaaattatttcgaaaaaacatcatgcccttataattaaggataaacatacaattatcattgataatgaatcgtctaaagattatatagaatttaaaaacaacaaactattttacaaaattaatggaaatggcaatatcgttttactaaataacgtcatcaatgcagaatttcaaattttaccttctaacatcataaaattaaatctaaaaataggtgataaaaacgactactatgaaaaaaacttatttttataaaatgaaaggatatataagtagctatacattatttattcttagtatatatttgataattatatctacttattctgctcaatatagtataaaattaaaaacaatacataatattcaaatatattatgatagtataataagtgataaacttaagagaggtgattaggatgactcattcttatttaccacttatattaacaggctttatgggtactggtaaaagtactattggtgaatatttggcttcaaaattatactattcatatattgatttagatacatatatagaaatgaaagaatttaaaacaataccagatatttttaatgaaattggtgaaaaaggatttcgtaagttagaatataactatttaaaggattgtattggtaaatacgatattatatcaacgggaggagggattatagaaaacgatgattctatctcacttttaaaaaataaaacagttatttggttagattgtgatattgatattatctatcatagaattgctaatgatccacatagaccaaatgcgaaaaacaaaagtgaaaaacaattaaaagacttgtatttatcgagagtttcaagatataatgaaatcgcatccacaaaagtagatagtagtaaaacaattgaatgtgtatataaaacaattttaaatcatataccatgcgaatgatcagtattagagagaataacttgaactgattctatagttgttttgaaattatgtcatgttatcgccgaaggtgcaagtaaactacgaaactctcaggcaaaaggataatactgttacgcagtcctggatttgttatttagacagggtagcttctgctactctgctttttttataaaatagggggtttttaaatgacaagcgaattaaaaaagacaccattatatgaaacttatgtaaatagtggtgctaaaatagttgaattcggtgggtgggctatgcctgtccaatttactagtattaaagaagaacataacgcagttagatacaaagtgggtatgttcgatgtaagtcatatgggagaaattttaattgaaggtgaaaatgctagtaaatttgttcaatatttactttcaaatgatactactaatttatctgaaactaaagctcaatatacagctttatgtaatgatgagggtggtattattgatgatttagtaacatataaaattgctgataacaaatacttattaattgttaatgcagccaatactgataaggatttcgaatggattcaaaaacatcaatctaaatttaatgctgctgtaacaaatgtgtctgaacaatatggtcaattagcgattcaaggtcctcaagcaagaactttagtaagtgaacttgttgatgttgatgtaagtgaaatgaagccttttgaattcaaacaaaatgtaactatctttggaaaaaatgttatcttatctcaatctggatatacaggtgaagatggttttgaaatttattgtaattcaaatgatacagttgacatttggaatggttttattgataaaggcgttgtaccttgtggtttaggtgcaagagatacacttagattagaagctggtttacctcttcatggacaagatctcactgaatcaatcacgccttatgaaggtggaattggttttgctgctaaacctttaattgaagatgaatttattggtaaatctgttttaaaagatcaaaaagagaatgggtcaaaacgacgtactgtgggtttagaacttatagataaaggcattgcaagaacgggttatacagtaatgaatcttgacggaaaagaaataggtgaaattacttcaggaactcaatcaccttcttcaggaaaatcaattgctatggctattattgatcgtgatgaatttgagttaggtaaagaattactagttcaagttcgtaaaagacaattaaaagctaaaattgttaagaaaaaccaaatcgaaaaataactaaggggtgtgcaatgtgagtcatcgttatataccattaactgataaagataaaaaagaaatgttagaaacaattggagcaaattcaattaccgagctctttggagatattccaaaagatattttacttaatagagatttaaatatagatagtgcagaagctgaaacttcacttttaagaagattgaatactattgcaaataaaaatattactaaagaaacacatgtgagttttttaggtgcaggagtatatgatcattacacacctgcagtagtagacgctatgatttctcgttctgaattttatactgcttatacaccttaccaacctgaaatttctcaaggtgaactacaagcaatttttgaattccaaacattaatttgtgaacttactcaaatggatgtcgcaaattcatctatgtatgatggcataactagctttgccgaagcttgtatattagcttttaatcatactaaaaagaacaaaattgtagtatctaaaggtctccattatcaggctctacaagtattaaaaacatatattaaagtaagaaaagaatttgaaattgttgaagttgatttaaatggaacgattactgacttagaaaaattagaacaagcaattgatgatgatactgcagcagttgctgtacaataccctaacttctatggaacaattgaagatttagaaaaaattcattcttatattgaaaataaaaaagcgttattcattgtttattctaacccattagcattaggcgttttaacacctccaggacaatttggagcagatattgttgttggtgatacacaaccatttggtattcctactcaatttggcggtcctcattgtggttactttgctactactaaaaagttaatgcgtaaagttcctggcagattagtaggacaaacgcaagatgatgaaggtaatagaggatttgttcttactttacaagctcgtgaacaacatattcgtcgtgataaagccacatcaaatatttgttcaaaccaagcattgaatgctttagcatcctcaattgctatgtcagctcttggtaaacaaggtatttatgatattgcggttcaaaacttagaacatgctaattatgctaaaaatcaatttaaaaataacagttttgaagtcctagatggtacatcttttaatgaatttgttgttaagtttgatcaacctatcaaaaatgtaaataaaaaattagcagaacatggtttcatcggaggctttgacttaggtgaagtttcatcagactttgacaatcatatgttaattgctgttactgaattaagaactaaagaagagattgatacatttgttgagaaagctggtgagctaaatgacagtaagtaaatctagtccattaatttttgaaagatctagagaaggtagatatgcatattctttaccgcaaagtgatattaaaactgactctgttgaacgtattttagatgataaatttattcgtaaaaataaagcagagtttcctgaagtggcagaattagatttagtacgtcattacacggaactttcgaataaaaactttggggtagattctggattttatcctttaggttcttgtactatgaaatataatccaaaaatcaacgaaaaagttgctcgtatttctggatttgcagaatctcatccactacaagaggaagaacaaattcaaggttcattagaaattatttatagtttacaagaagaactaaaagaaattacaggtatggatgaagtaactctacaaccagcagcaggtgctcatggtgagtggacagctttaatgatttttaaagcatatcatataaaaaatggtgaaggccatcgtaatgaagttattgttccagactctgcacatggtacaaaccctgcatcagcttcatttgctggatttaaatcagtaactgttaaatctaatgaacgcggtgaagttgatatcgaagacttaaagcgtgtcgttaatgaaaataccgctgctattatgttaactaacccaaatactttaggtatctttgaaaaaaatattatggagattcgtgaaattgttcatgaagcaggcgggttactctattatgatggagcaaacttaaatgctattatggataaagttcgccctggagatatgggatttgatgctgtgcacctaaacttgcataaaactttcacaggtcctcatggcggtggtggtcctggttcaggtccagtcggcgtaaaaaaagaattagcaagttatttaccaaaaccaatggtgattaaagacggtgatacatttaaatatgataatgatattgaaaattcaatcggtcgggtaaaaccattttatggtaactttggtatttatttaagagcttatacgtatattagaactatgggtgcaaaaggattaaaagaagtgtctgaagcagctgtcttaaatgcgaactacattaaagcacgattaaaagatcgttatgaaatcccttatgaacaatattgtaaacatgaatttgtcttaagtggatctaaacaaaaagaatatggtgtccgtactctggatatggcaaaacgtttactagactttggtgtacatccaccaacaatttacttcccgctaaatgtggaagagggtatgatgattgaaccaaccgaaactgaatctaaagaaactttagactacttcattgatgcaatgcttcaaattgcagacgaagttgaaagtaatcctgataacgtattagaagcacctcatacaactatcattgatagattggatgaaacaactgcagctcgtaaacctattcttaaatttgaagatttacatcaagaaaaactttaatattgtaaatagtttaatggatgatttaatttcagaaataataaaactctcaagaaatttcttgagagttttattatttctgataattattttttagttttaattttaccagtccattttttatagccgcctttaagcatgtataaatctttatatccattttttttcaaaatgcgagcagcacgataactggcaataccatttgcatcacaaagatatacaggttgatctttacgtaaaccttgaaatctttgtctaaacatagatattggaatattgcgagcaccattaatatgaccataatcataatcaactttttcacgtacatcaatgacttgggcttttcttaaacctttatgaaattcgttttgatctagttcagttacagctcgtcgattaagaaagaaatttccaaccatgtaaaggattattaaaactataattattaatgctataatcaaagatacattcatattgcatcctccctaattaaccgatattattaattataaaggtgttagctcaatttatcaaaatttttttattgtttcatattattgatacattctaacgtaatattaacgttgaatttatataaattaagttgtgattggagtttttatatgactgaaacatggaattttatcaatactggaagccatgacccctattataatatggcgatggatgaagccttattaaattttgtttcaagaggggaaattgatcctgtagttagattttatacttgggatcctgctaccttatctgtaggttattttcaaagattaaaaaaagaaattgatatcgataaagtgaaagaaaaaggatttggtttagttcgccgtcaaactggtggtagaggcgttttacacgacaaagaattaacatatagtgttatcgtacctgaatctcatccaaatatgccttctacaattactgaagcttaccgtgtcatttcagaaggacttttagaaggctttaaattattaggatttgatgcttattttgctattccacgttctaaagaagaaagagaaaaattaaaacaaccaagaagtgccgtttgctttgatgctccaagttggtatgaactggtcgttgaaggacgtaaaattgcaggtagtgcacaaacacgtcaaaagggcgttattcttcaacacggatcactacttcaagatgtagatgtagacgaattatttgatatgtttatttttaagaatgatcgcttgaaagaaaaaatgaaaaaagctttcgtagataaagctgtagcaataaatgatatatcagatagacacatctctattgaagaaatggaaaaagcatttgaagaaggatttaaaaaaggattaaatattgaatttaaaccactatctctaactgaaaatcaattagccgaagtaaaagtgcttgaagaaaaatatcgttcagaagagtggttatataaaaaatagaaataaaacaaggaggcttaagagtactaatactcttgaacctccttgtttttattttcgttgtctttttttatattttcgaactgctcttcggtattttctctgatcttctgtaaggaagaaaaaataatagataaagtaaataataagaacaatcattataagtgtgaaaattgatttcatgaacgtcattacaaaaatatttagatttagcagtaaacctatagctgctataattaaaacgaaataaaatataatatttttcaactaaacaactcctattttatgaactactagaaacattaatctgtgataacttcatcttaccttgatttattttctttttattattagattcatagccatttttaatatctttaaaaccagattgaagatttttgtttatttgtttaatatttttgtcttcgttagtattatcatttgatatattacctttatctgtatcacttttatatttactgtaggcatcatctatatcatttgataatgaatttagcttttcaagattttgatttttatcatctttttttgttttatttaaatcaagttgattaaatttatcgataatcttagcaatatctttataataatttgaagaagcttgtaaaaaattagcttcattattattatcaacagttttagatacattctttttatctttatttaatgcttctaactgagatttttgattatttatatcttgatttagttgttgaatttttaattttaaattatgattctcatctcttaaattggttgttttatcttctaaaggtcctaaattttgagagccacagccaaccaaaaacaaagaagctcctaaaatcgttaataatcttttcatgtaaatctccctaaatcaaaatatctttaatattttaagtatgttattattttaatgtatataataaaaatgtacaaacgttatacaaggagtgggttaaatggataaattagctaaagttcgtcatatattagaaagtgaaaatcttgatgctcttgttatattatctgactataatagacgttatatttctgattttaccggaacaagtggcgctttaattatttctaataatgaaaataagttgattacagattttcgttacattgaacaagccacaaaccaagccactcattttgaaattgtaaatcgacgtagtgggattattgatgagataaaagaaattatagaaaacaagcagtataaaacagtaggttttgaaggtcatttagttagctatgatacgtttcgagaattaagccaaattgatacgaattacgtaagtatagacaatgccattgaaaaaattagagaagttaaatcatctgaagaaatcgataaaataaaatatgcggctaagatcgtggatgatacttataactacattttaaacattgcaaaagttggaatgactgaaagagagttaaaagcattgcttgaaagcaaaatgttagaactaggcgctgatggtccatcatttgatacaatcgttgcttctggttatagaggggctttgcctcatggagttgctagcgataaagtaatcgaaaaaggtgacatgattactcttgattttggtgcatattatagaggatactgttcagatattactagaacatttgcgattggtgaacctgataaaaaattgaaagaaatctataatatcgtgcttcagtctcaaataaaggcaattgaagaaatcaagccaggtatgacaactaaggaagctgatgcattatctagagattatattaaagcacatggttatggtaatgaatttggtcattctttaggtcatggtattggtttagatattcatgaaggtccagtattatctaaaaacactaatgatacagttcaagttaataattgtgttactattgaaccaggtatttatgtagatggtcttggtggagtgcgtatagaagatgacattttaattactgaaaatgggtgtgaagtctttactaaatgcacaaaagaccttattattttatagtaagcgtataattgaggaggaaactgaatgatttcggttaatgattttaaaacaggtttaactatttcagtagataatggaatttggaaagtaattgatttccaacacgtaaaaccaggtaaaggttctgcttttgttcgttctaaattacgtaatttaagaacaggcgctattcaagaaaaaactttccgagctggtgaaaaagtagaacaagcgatgattgaaaatcgtcgtatgcaatatttatatgctgatggagatactcatgtcttcatggataatgaaacatttgatcaaacagaattatctggcgattatttaaaagatgaattaaaatatttaaaagcgaatatggaagttcaaattcagtcatatgaaggcgaaacgattggtattgaattaccaaaaactgttgaacttgaagttactgaaacagagccaggtattaaaggtgatactgcaactggtgctacaaaatctgctacagttgaaactggttatactttaaatgtaccattatttgttaacgaaggcgatgtgttagttattaatacaagcgatggcagttacatttcaagagcataattaataattttaaaaatttaaattaaaacaggttaatgcatatttaattatggattaacctgtttttatataaatgattaaaaagaataatcaatattttagtatctaagttttaatataaatttactatattataattgcttatatacttttttaatcataagttagatctcagttaaatgaacacgcttgaattgaatttcacactcaagtaaaatagatgggtagatgaaaactaagtcgaggagtcattaaattatgaactttaaagaaattaaagaattaattcaaattcttgatgaatcaagtttaactgaaattaatatagaagataataaaggtagcgtagttaatttaaaaaaacaaaaagaaactgaaattattacgcctcaatattcacaacaaccaacagtgatggcatctcaaccatcagtacaaacaccaatggcaaatgaaatgtctcaaactagtgaagtaaaccaagaaaatgaaacgtcaaactacgaaacaattaatgctccgatggtcgggactttttataaatccccatcacctgaagaggaagcttatgtacaagttggggataaagtcactaatgattcaactgtatgtatcttagaagccatgaaattatttaatgaaattcaagcagaagttacaggagaaatcgttgaaattttagttgaagacggacaaatggtagagtatggccagccgttatttaaggtgaaataatgaaaaaagtattaattgcaaatcgtggtgagattgcagttagaattattagagcttgccatgatttaggtattcaaactgttgctatatattctgagggagataaagatgcattacatactcaaatcgctgatgaagcatattgtgtcggtccaactcagtctaaagattcatatttaaatattccaaacatcctatctatagcaacttcaacaggatgtgaagcaattcatccaggttatggatttttagccgaaaatggggatttcgctgaactttgtgaagcttgccaattaaaatttattggaccaagttatcaatccattcaaaaaatgggtattaaagatgtagctaaagctgaaatgatagccgctaacgtgcctgtagtaccaggaagtgatggattaattgattcgattgaagatgctaaaaaagtggctaaacagataggatatccagttattattaaagctactgctggtggcggaggtaaaggaattcgcgttgcacgaaatgagaacgatttagaaaatggttaccgtatgacacaacaagaagctcaaacagctttcggtaatggtggattatacttagaaaaattcattgaaaatttccgtcatattgaaattcaagtgattggtgatcaattcggtaatgtcattcatttaggcgaacgtgactgtacaattcaaagacgtatgcaaaaattagtagaagagtcaccttcgccaatacttacagatgaaaaacgtaaagagatgggtaaagccgctattcgagcagctaaagcagtgaattatgaaaatgctggtactatagaattcatatatgatttaaatgaaaataaattctattttatggaaatgaatacacgaattcaagtagaacatccagttactgaaatggtaacaggtgtagacttagtgaaattgcaattaaaagttgctatgggagaaccgctaccttatacgcaagatgatattacaataaatggccatgccattgaatatagaattaatgctgaaaatccttataaaaattttatgccttcaccaggtaaaatcacacaataccttgcgccaggaggatacggagtaagaatcgaatcagcatgttatacaaactatacgattcctccttattatgactcaatggtagcaaaattgattgtgcatgaacctaccagagatgaagcaataatgactgggattcgagcactaagtgaatatttaattctaggaatagatacaaccattccattccatcttaaattaatgaataatgatatttttaaatctggagattataatacaaactttttagaaaagtataatattatggctgagagtgaataggaggataaaacaatggtaaatgtagcagattattcacatgctaatttaggtaaagtagaaattgtaccagaagttatttcagtaatagcaagtattgctgtttctgaagttgaaggagtgactgggcatttttatgaactaaaaaagagtaatattgaaaaaataagtcgtaaaaatttaaataaaaatttaaaagttaatactaaagatgatggtattcatattgatgtttattgctctattaaacatggaataaaaatagctaaagttgcaagtaaaattcaaacttctatttttaattccattaaaacaatgactgctatcgaacccaaagaaattaacattcatatcatgcacatcacaattgaataaattaaagttaccataatacaaaggagtttcttatgagtcgcaaagaatcaagaaaacaagcatttcagacattgtttcaactagaaatgaaaaatacagatttaacaatcaatgaagctataaattttataaaagacgattatccagacttagattttgagttcattcattggcttgttacaggagtgaaagatcatgaacaagttttagatcaatcaattgaaccaaaattaaaagactggtctatacaacgattattaaaaacggatcgtattattttaagaatggctacctttgaattgcttcatagtgatacgcctcctaaagtcatcattaatgaagcagtagagctaacaaaacaatttagtgatgaaggtcattataaatttataaacggtgtcttaagtaatataaaataaacatatttgagtgatgaatcatgtcagaatatttaagtgtctctactttaactaaatatattaaatataaatttgatcaagatccacacttgcaatctatcctattaaaaggtgaactctcaaactttaaaaaacattctagtggtcatctttattttaatgtgaaagataaaaatagtgtgataagtgctatgatgtttaagggaaatgcttctaaactaacatttgatcctaaagaaggagacgaagttttattagaagctcgagtttcggtttatgaacgtagaggaaattatcaaatttatgttaataaaatggaaattgacggtataggaaatttataccaaaagttagagcaattaaaagaaaaactaaataaacaggggatttttaatcaaaatcataaaaaagcaatccctagattccctaaaaagattgctattcttacagctgatactggagcagcaatcagagatattcacactactatagatagtagataccctctagtagaaaaaatatcaattagtacattagtacaaggtattaatgctaaaaatgatattattgaaaaaattaagtatgcagatactttaggagtagataccatcattctaggccgtggaggcggctctattgaagatttatggaatttcaatgaagaagaagttgttcgagctatatatgagtgtcatacaccaattatctcagctgtaggacatgaaactgattttactttaagtgattttgtagcagatatgagagcagcaactcctactcaagctgctgttatcgctacaccagatcagtacgaactcattcagcaaatacaacagtatcgattttctcttactaaaagtattaaacaactaatagaaaaacaacataaacaattagattatttatcatcttattataaatttaagcaacctacgttgttatatgaacaacagattcaacgaagagatgatttagaaaaaaaactaacacaacgtttaacgttaaatattgaaaaaaaaagaaacaatatcactgtattgcgtcaacattttaatataagaagattaaatgattcaattgtacaatatcaaaaaatgatccgtaataatgaaaatagattaataaatttaacatataacttaattaatcataataaagctaatttaaagaataaaattgagcaattaaatcaacttagtccaactaatacaatgttaagaggatattcaattattaataaggacaataaagtcattacaagcacacacgatttaaatgaacaagatgaaatcacattatcaatgaaagacggtaatatagacgctatagttaagaaagtaaggtgtgaagatgagtaaagaacaacaaagttttgaagaaatgatgaaagaattagaaagtatagttcaaaagttagataatgaaactgtttcattagaagaatctcttgatttatatcaacgtggtatgaaattatcatctgcttgtgacaaaactttgaaagatgctgaaaataaagtaaatcaattaatcaaagaagaagcaaaggatgaagatgatgttgaagaaatcaatgaatgaattgattgaaattataaataataatcttgacggtattataaaatcgtctcctttaaatactaaactagaggagagtatgcaatattcacttgatgctggtggtaaaagaattcgtccagtgcttgtattactcactttagaagtgttaaatgaaaattataaaaaaggtttacaaaccgcactggcattagaaatgattcatacttactcacttatacatgatgatttacctgcaatggacaatgatgattttagaagaggaaaattaacaaatcataaagtgtatggagaatggaaagcgattttagcgggagacgccttactaacaaaatcatttgaactaattgcaaatgataaaaacttagatgctgaaacaaaagtaaaagttatttcaagactagcacatgatagtggcaatctcggcatggtcggtggccaaaccttagatatggatagtgagaatactccaatagaattacatactctagagcaaattcataaggcaaaaactggggctcttttaaaattttctattttaagtgctgcggatattgccaatgtaaacaaagaaattttaaatacattagattatttcagtgaacacttaggcctaatgtttcaaataaaagatgatttattagatgtttatggtgatgagaaaaaattgggtaaaaaagtaggaagcgatgtagaaaaccataaaagtacttatgtttctttacttggtaaatcaggcgctgaagaaaaactaaaatatcataaagatgctgcaatagatacaattaatcaattgaaaccacaatatgatgttgaaccgcttctagaaattgtagatttattttattcacgtgaccattaatagttagagtttttctctttaaagattactaagacaataatctttaaagagttttttgttttagtaatctacttttaatgatttaaaatgcataaatgtatataaatttaaatttaatttaaatagaaaatatgataatacgtatcataaataataatatcattcttcaaatcaacctttctaaaggataactttagtagtagttaaaataacgttgtgttaaaatcattgtataaatattcgaaactaggagtgttcataatggcaaaaaaatctgtaagacatataaaaataagagaaattatttcaagtgaacaaattgaaacacaagatgaacttgtaaaacgtctaaatgaatacgacctaaatgttactcaagcgactgtctctcgtgacattaaagaattacaattaattaaagtacctgcttcatcaggacagtatgtatacagccttcccaacgatagaaagtaccatcctttagaaaaattaggtagatacttaatggattcatttgtaaatattgaaggaacaggaaacttactcgtactaaaaacgcttcctggtaatgctcaatctatcggagcaatcttagatcaaattgattgggatgaagtattgggaactatttgtggtgatgatacctgtctattaatatgcagagatgaagaagcaagtcatacaattaaaacaagaattttcaatttattataaggatgcgattaatctatgttacaaaccttatcaataaagcaatttgcaattatagatgaactcgaaattcatttttctgatggtttaactgtgcttagcggtgaaactggatctggtaaatcaattattatagatgcaataggccaacttattggtatgcgtgcctcttctgattttgtaagacatggagagaaaaaagcaattatcgaagggatttttgatattgataatagtaaagaggccatttcagttttaaatgagttagatattgatattgatgaagactttctattagtaaaaagagaaatttttagttcgggaaaaagtatttgtcgtattaataatcaaattgttacgcttcaagatttaagaaaagtgatgcaagaacttttagacatacatggccaacatgaaacgcaaacgttattaaaacaaaaatatcatttaaaattattagatgattatgctgaaaatcaatatagcagtgttaaagaacaatatgaaactacatttaatgaatataaagaaaagaaaaaagaacttgaagagttacagtctgctgatcaagcattattgcaacgtcttgatttaatgaagtttcaatttgaggaattgcaagaagcctctctaaaagaaggtgaaattactcaattagaatctgatataaaacgaatccagaattctgaaaaattaagtttagcattaaacaatgcacatgtcacacttacagatgaacatgctatcactgaccgtttatatgaattaagtaatcatttacaaactattgatgacattattccaggtagatttaaaaaacttaaagaagatattgatcagttctactataccttagaggatgctaaacatgaactatacgatgaaatgtcaaatactgaattcgatgaacaattacttaatgaattagaatctagaatgaacttactgaataatctcaaacgtaaatacggtaaaaacattgatgaacttattacttatcaatctaaattagaaaatgaaattgctaagattgaaaattatgaagaaagtacttctcaattaaaagaagaaattgacctactttatgaaaaagtaataaaatatggacagtcattatcgaaggaaagacgaattgtagctcgaacgttacgggagcatatcgtggctgaaattcaaaatttacaaatgaaagaggctaacctcgaaatttcatttcagccattagaaactcctacaatagaaggaattgaatttgtagagtttctcattagtcctaacaagggcgaaccacttaaaagtttaaataaaatagcttctggaggagaactttctcgtattatgctagcgttaaaaagtatattcgttgaatcaagaggtcaaactgctattttgtttgatgaagttgactcgggtgtttctggtcaagcagctcaaaaaatggctgaaaaaatgagagatattgcaaaatatattcaagttatttgtatatctcacttaccgcaagtagcttctatgagtgatcatcacttattaattagtaaaatgtctaagaatgatcgtacaacaactcaagtgaaagagttaaaaaaagaagataaaattgacgaaattgcccgtatgatttctggagcaagtgtaactgaattaacaagagaaaatgctagagaaatgattgctcaaaatcataaatagtttataattaaataatttaaattaaggttggatgtcgaaaagaaatagaacatattgagtataatgttattttttatattcaaattgtttattcacacttttcaattctaacctttaaatctgattaataaggagtagcaaaatgtctgaaaaacaatatgacttagttgttttaggtggtgggacagcaggatacgtagcagcgattcgtgcttctcaattaggaaaaaaggtagcaattgtagagaaatctttattaggtggcacatgtttacataaagggtgtattcctactaaagcgctacttaaatctgctgaagtgactcgtactgttagacaatcttcagaatttggtatagacacaaacggtttacatattaattttgaaaaaatgatgaatcgaaaaacggatattgttaatcaaatgcataatggcgttcaaagtttaatgcaaaaaaatcatattgatatttataatggtattggacgtattatgggaacttctatattttctccacaaagcggaacaatctctgttgaatacgaagatggcagctcagagttacttccaaatcaatttgtacttatcgctacagggtcacgacctcaaacattaccatttttaaaaattaatcatcgaaatattttatcgagcgatgatatattacaaattgatacacttccagacagtattgctattgttgggggcggcgtgattggccttgaatttgcttccttactaactgatttaaatgtaaatgttaaagtgattgaagcaggtaaacgtatattaccttctgacagtaaatccatttctacatttttaaaagatagtttaattgaacgaggtgtagaattttttgaagattgccaactaaatgaagagaatatcatacataaaaatgatgtcatccaaatacatataaatgaaaaaactactattacagttgataaaatattagttgcagtaggtcgcgtacctaatacaagtgatattggtattcaaaatactaaaattcaattagatactcatggttatatcaaagtaaatgaatttcaacaaacgagtgataagcatctttatgcagcaggtgattgtatcggaacattacaattagctcacgtagcttctaaagaaggaatcactgcagttgaacatatgtttaatgatcatccgcttccagtgaattatcatttaatgcccaaatgtgtttatacttatccagaagtcgcatctatcggtttaaatatagaaactgctaaatctcaaaatattaaggcaacaagttataaagttccttttaatgctattggaaaagcagttattgaagaaactaaaaataaacgtggtttttgtgaaattatattaaataaggacaatggagatattattggtctaagtatggtaggcccacatgtcacggagttaataaatgaagttgctttattacaatttatgaatggatcaacattagaattagggttaacgactcatgcacatccgtcattgtctgaaatattgatggaacttggactaaaggctgaaaatagagcaatacacgtttaaaggaggaaataaaaatgattgactacaaatctgtgggacttacagatgaagatttgagagaaatatataaatggatggacttaggacgaaaactagatgaacgcttatggttacttaaccgtgctggaaaaataccatttgtagtaagtggtcaaggacaagaagccactcaaattggtatggcgtatgcaatgaaagaaggagatatttcatctccgtattatagagatttagctttcgttacatatatggggatttcaccttatgatacaatgttagcttctttcggtaaaaaggatgacattaattctggaggaaaacaaatgccttctcattttagtcatagagaaaaaggtattttatctcaaagttctccggtagcaacacaaatccctcactcagtaggagcagcattagcattaaaaatgaatcaacaatctaatatagcaactgctactgtaggagaaggtagttctaatcaaggagattttcatgagggattgaattttgctggagtccataacttaccgtttgtatgtgtaattatcaataataaatacgcaatttcagtaccagattcattacaatatgcagcaacgcatctatctgatagagcaataggttatggtattcatggagaaaccgtagatggaaatgatccaattgcgatgtacaaagcaatgaaagaagcaagagaaagggcacttaatggcgaaggagcaacattgattgaagctattaccactcgaatgactcctcattcttctgatgatgatgatacatatcgttctaaagaagaaagagatgctttcaagacatctgactgtaatcttaaattcaaaaatgaattactcgatttaggcattattgatgaagattggttaaacgaattagataacgcacataaatctattatagataaagctacaaaagatgctgaaaatgctcaatatccagatgtagaagaaacatatcaatatgtgtatgatccagaaggagatattttcaatgactaaaatgagttatatagaagccattcaaaatgcacaagacttggctatggaaaaagataataatatttttatattaggagaagatgtaggacgaaaaggtggtgtattcggtgcgacacgtggtttacaagaaaaatatggagaactgcgcgtaattgatacgcctttagcagaatcaaatattatcggtactgcaattggtgcagcaatgcttggcaaacgtcctatagctgaaattcaattcgcagattttattttaccagcagttaatcaaattattagtgaagccgctaaaatgcgatatcgttctaataacgattggcaatgtcctttaactgttcgtgcaccattcggtggtggcgtacatggtggtttatatcattctcaaagtattgagagtatctttgcatctacacctggattaacaattgtaattccttcaactccatatgatgcgaaaggtttattattatcttcaattgaatcaaatgatccagtattattttttgaacataaaaaagcataccgatttttaaaagaagaagtacccgattcttactatactattcctttgggtaaagctgatgttaaacgtgaaggtgatgatattacagttttcacttatggtttatgtgttaactattgtattcaagcagccgatattttagaggcagatggcattaatgttgaagtagttgacttaagaacagtttatccattagataaaacaacgattattgaacgcgctaaacgaaatggtaagattttgcttgtaactgaagataaccttgaaggtagtgtcatgtctgaagtttcagcaatcatagctgaacattgtttattcgaattagatgcaccaattatgcggttagctggtcctgatgttccatcaatgccattttctcctaacttagaaaatgaagtaatgatgaatcctgataagatattaaaaaaaatgcgtgagttagcacaattttagggaggtaacataatggatgttaaaatgccaaaattaggagaaagtgtccatgaaggtacaatcgaacaatggttagtttctgaaggggatcatgtagatgaatatgaaccactatgtgaagtagttacagataaagtaacagcagaagttccttcaactatttctggtacaattacagagttaattgctactgaaggtgaaacgattgaaatcaatcaaatcatttgtaaaattcaacccgatgatacatctttaaattctaatcaagacgatactaatgaaacacctagtcaaacacaaagtaattctgtaaagagtcagtctaagccttctaacacaaatcaatcatctacgaattcgatcaataatggaagattttctccagtcgtatttaagatagcttcagaaaacgatattgatttatcacaagtacctggcacaggatttgagggtagagtaactaaaaaagatattgaaacttatattcaagaaaataaccagcaagacttaaaagaaacacctaccactcagataaccaatcattccgaaacgagttcaagaaataataacgcttcatcaaataaaccattagacgattatacagtaccagttaaaggcgtgcgaaaagcaattgcccaaaatatggttaccagtgccactgaaattccacatggctggatgatgatagaagtcgatgctacaaaccttgtgaaaactagaaatcattataagactgtgtttaaaaaacaagaaggatataatttaacattctttgctttctttgtaaaagctgtagcagaagctttgaaatctaatccattacttaacagcagttgggatggtaatgaaattataattcataaagacatcaatatttcgatagctgtagctgatgaagacaaattatatgttcctgtaattaaaaatgcagatgaaaaatcaattaaaggtattgctagagaaatcaatcaactagcacaaaaagctcgaaatcaacaactgactcaagaagacatgactggtggtacttttacagttaataatactgggacatttggttctgtatcttcaatgggtattattaatcatcctcaagcagcaatcttacaagtagaatcaattgttaaaaaacctgttgtcatcgacgatatgatagctataagaaatatggttaatttatgtatttcaattgatcatcgtattttagatggtgttcaaactggacgatttatgtcgcaagtaaaaaatcgaattgaaagctattcaattgaaacaacaaatatttattaaaagtttgttatattacaaccaacctatttgaactatatgttggaaattagtaaaatgacaataaataataattgactgaaaggtgattctaaatggatttaaattttgatttatatatgaatggtgttgtagaacaagctagaaatgaaattgaatctgctggttatgaacaattaactacttcagatgaagttgataaagtatttaaacaagatggtactacactagtaatgataaattcagtttgtggatgtgcaggaggtatagcgcgtccagccgcaagtcacgcacttcactatgataagttacctaatagattagttactgtatttgctggtcaagataaagaagcaactcagcaagcaagagaatattttgaaggatacgcaccttcaagtccttcatttgcacttatgaaagatggtaagattactgaaatgatagaacgccatcaaattgaaggtcatgacgtaatggatgttatcaatcaacttcaaaagttatttgataagtattgtgaagaaagataagaggaacaatacatgctaactttaaatccttatagaattggatttagaacacttaaaacagctgtaggaattacattaggcgttattctagctaaatggataggacttgataactatgcttcaagtgctatcctcattgttctatgtattaaacatactaaagttcactcactacaagcaattggttctcgattcgtttcgtgtttattaatgttattttttggttcatttatttttaatttacttggtcaaaatgcagtcgttttaggattaattgttttattatttattccacttacagtgatgttgaatgttcaagaaggtgtagtgacaagttgtgtcattttacttcacgtatttaatgccaaagttattagtcttcatttaattattaatgaaattttacttcttataattggtttaggaatagcatttttaatgaatttaattatgcctagtctagataatacattaggtaattttaagaaggaaattgaaaatgaaattaaagcaatatttaaacaatatagtgaagcatgtttaaatattaataaacaattgtcaatttcttttgatacattagaaaacaatattcgtaaggctaaatctattgcgtttagagacgttaaaaatcactttgtgcgaaatgaaaactcatattatcactattttgatatgagagaagaacaactagaaatactacgcagaatccaaacattaattcataatacttcatctaatgatcctttgttagagactgttgcccatttaatgactgaaattggagataatgttaatagtaatgattatactgtgttaagactacattcattatatgagatacgtttaaaattagacgaattgccattgccagaatcacaccaatctttaaaatcaagagcaagtatgatgcaaattttaaatgaattagaagaatatttaaatattaaatctcaattcggctctttaaaattacatagtgaaatataacatctaaaaataatttctaatcaaagtaaaaagacaaacttcctttaaatacaaaaagtttgtcttttttatttgcataaatttaagaaataataataaaaactatcgtcaaatttggttttttgtcgatagtttctattctaagtaatttttaatgcatgagaggaacaagacttgtaagtaacagtgcagctacaactgcaattaacatgataatgataataatttttagcactttattattcaatgtaaacgctccttgaaacctttaaataatttaattattcgttatattaataacttataatatataaaataaccttaaatgatttcgataaaaatggcaatcaatttatttactctaattctcaaagtcagttaaaatattaactatataagaaaggggttttcataatgattaatagtcgccgtttacttaatacttttttagagttagtgcaaattaattctgaaactgggaatgaagaaacgatacaacccattctaaaaaagaaatttatagatttaggattaaatgttgtagaagataatgcgtctaaaagagaatggtaaggtgcaaataatttaatttgtaccttaccaagtagtgaaggaaaagaaaatgtttctaaaatctattttactagccatatggatacagttgttccaggtattaacgttaaaccaatccttaaagaagatggctatgtatattcagacggcacaactgtattaggggcagatgataaagcaggtatagctgctttgttagaaatgattcaaactataaatgaacaagaattacctcatggacaaattcaatttattatcactgtaggagaagaagcaggtttaaaaggtgctaaagaattagatcaaaacttaatagatgcagagttcggctatgctgtcgatgccagccaagcggttggaacaacagtggtgggtgccccaactcaaatgattattaatacaactatttatgggaaaacagcacatgctagtaaacccaaccaaggtataagtgcaattcatattgcagctaaggcgatcaataaaatgcatttaggtcagattgatcaagataccacagctaatattggtaaattttatggcggttctgctacaaatattgttgcagataaagtcattttagagggagaagctcgttcgcataatgataaaagtttagagtatcaagtcaaccatatgaaagaaactttcgaaactacagcaaaagaattaggcggtaaagaaaatgttgaaatttctaagagttatcctggttttagaagaaacgattctgagactgtaactcagtatgctataaagagtgcgaaaactttaggtctttcaggtaaaactgttattgctggtggcggttcagatggcagtattattaacacgtatcatattccaactgtcatattaggtgtaggatatgaacatattcatactacttctgaacgtattcctgtagctgctttaaatcaacttacgagtcaattgattaaaattgttgaattagtagcgaaataatattttactttagtgaagtcatttatatttttgtgatacaatactaatgaaattattgaataagagaggtaagtaatatgactcaacaaataggtgttgtaggtttagctgttatgggtaaaaaccttgcatggaatatcgaatcacgtggttatagcgtatctgtttataaccgttctagtgataaaacagatttaatgattaaggaatcagaaggtaaacaaattcatccaacgtattctttagaagattttgtgaactctttagaaaaaccacgcaaaatattattaatggttaaagctggtcctgctacagacgcaacaatagatagcttattacctttattagatgacgatgacattttaattgatgggggtaatacaaactatcaagatacaattcgtcgtaacaaagctcttgctgaaagtggtatcaactttattggaatgggggtttctggtggtgaaatcggtgcgttaactggtccatctttaatgcctggtggtcaacaagaagcttacaacaaagtaagtgatattttagatgccattgctgctaaagcaaaagatggtgctgcatgtgtagaatatattggaccaaatggtgcaggacattatgtaaaaatggttcataatggtattgaatatgctgatatgcaattaattgctgaaagttatgcaatgatgaaagaattattaggtatgtctcatgaagaaatttctaaaacttttaaagaatggaatgctggagaattagaaagttatttaattgaaataacaggcgatattttcactaaattagatgaaaataatgagcctcttgtagaaaaaattcttgatactgctggtcaaaaaggaactggtaaatggacatcaattaatgcattagaattaggtataccattaacaatcattactgaatctgtatttgcacgtttcatttcttcaattaaagaagaacgtgtgaaggcatcgaaagtattaagtggtcctaaatcaaactttgatggaaatagagaagaattcttagaaaaaatccgtcaagcgttatatatgagtaaaatttgttcatacgcccaaggtttcgcccaaatgcgtaaagcgagcaatgaaaacgaatggaaccttaaattaggtgatttagcaatgatttggcgtgaaggttgtattattcgtgcccaattcttacaaaaaattaaagacgcatatgacaataattcaggtcttcaaaacttattattagacccttatttcaaaggtattgttactgaatatcaagatgcacttagagaagtagttgctactggtgttaaaaatggtgtaccaacacctggtttctcagcaagtatcaactattatgatagctaccgttcagaagatctacctgctaatttaattcaagcacaacgtgattattttggggcacatacttatgaacgtaaagataaagatggtattttccatactcaatggactgaagaataattattgcatgattaaaaatctgggacatcattaagtgtctcagatttttttattatgataggtttgtatagatgtcttaataaatatagtcttgttattttaatttatatttaatcgatatatcccaagttgacatttagagactcgattagtacgataaatataggtgtaaacgttttctaaaaaactggattatccatatataatgttattacatattattttatatttctataaatccagaaaaaattagattatatattaaagactaacattgactattaaaataactaactcgaatactatgatttattatttcaaagttcatttatttacataatattttcaaaggagcgatataaatggaaaaaaattggtggaaagaagccgtagcatatcaagtgtatccaagaagttttaatgatagcaataatgatggtattggtgatttaccagggatggtagaaaagttggattatctgaaagatttaggtattgatgtcatttggcttagtcctatgtataaatctccaaacgacgataatggttatgatattagtgattatcaagatattatggaagaatttggaacaatggaagactttaatcatttgttatctgaggttcataagcgtggaatgaaattaattttagaccttgttgttaaccatacatctgatgaacacccatggtttatagaatctcgttctagtaaagataatcctaaacgagattggtacatttgggcagatcctaaacctgacggttctgaacctaataattgggagagtattttcaatggttcaacatgggaatatgatgacacaacaaaacagtattatttccatttatttagtaaaaagcaacctgatttaaattggagtaatcctgatgttagagaagctgtttttaaaatgatgaattggtggttcgaaaaaggaattgatggttttagagtcgatgcgatcactcatatcaaaaaaacatttgaagctggtgatttacctgttccaaaaggaaaacaatacgctccagcatttgatgttgatatgaatcaaccaggcattcaagattggcttcaagaaatgaaggacaaatcacttagtcattatgacattatgactgttggagaagcaaatggcgtgaatccagataatgcaaaagagtgggttggagaaaaagaaggtaaatttaatatgattttccaatttgaacatttaggtttatggagtactggagactctaaatttgatgttttatcttataaaaatgtattaaaccgttggcaaaaacaactagagggtataggatggaatgcactatttatcgaaaatcatgatcaacctagacgtgtttctacttggggagatgataaaaagtattggtttgaatctgctactagccatgcagtggtatatttcttacaacaaggcacaccttttatttatcaaggtcaagaaattggtatgacaaactatccatttgaaagtattgaaacatttaacgatgttgctgtaaaaacagaatatcaaattgttaaatctcaaggtggagatgttaatcagttattagataaatataaaatggagaatcgtgataattctagaacgcctatgcagtggactaatgaagtaaatggaggttttactgaaggtacgccatggttcccagtcaatcctaactataaaacaataaatgtagcacaacaatccgaggattcagattccgttcttaatttttataaacgtctaattaaaataaaaaaatctgatgatatatatacttatggtgaatttaatttaatcgatgatgcgaacgagaatatttttgcttacacacgtaaactcaataataagacagttctagttgcaggaaatttaacagatcatgttgcatcattaaatttaccattcgaagttgaaccatctcaaattaagctacacaattataaaaatgatttagatatcactaatatgagaccttttgaagcgttcgtagccgaactttaatagtaaagcgttagatgacataagtttaataacttagtcatctaacgcttcttttattctatatcataagtttcttgtttaataggtagccataactgtattttagtgaacgggtcctcgaatgagagatcaaaaggataaatttcaacatataagctatttttttcataaggtagagtaagttgtaagctggattcaatataataccaagcttcattaacagtataatccacttgaccttgcaaattaaattttgcatagtgtcgccctggcaacaatcgactttctaagtgagctggataacgttcactaggtacgcccacaaataattctacaccttcatctaaaggacatgtaataacaaataactcatatggacttatattattatatcgttttaattcttttattttaccatctaaatataaatcttctaaaaaatcaggaactttgtaagggttagatagttgattagcctcaatatattttacatatccaactaaaggtgtgtctttagttgtttctagtctgtaagggtatggtgctctttctgtagttgttaatttaatatacaaacgttcattcatttttagttcttcttttttagtagaagcttgaataggagatattccatgaaaatcactaaaatcatttgcaaagtcattggaacttaaataattatagcgttttgctacatcaaccaatctcgaagaactttgtatcatttctttagcagcttcagtcatttttcgagagtgagcataactttcaggaggttgtccaacaatcattttaaacgattgatcaagatggtaaggggaaagaccaacgtaatcacttaaatcttgcaaattaaaaggctctaataaatgatcttctatatatacaattgcctgttgtatctgcttgataacgtccaaaaccttcactccaataaatttacaatcaatactaatattttacattattttataaaaatatacatcaataatataaaattaaattaaatttttaaatgactctttcaatattcaatttaaaaaggacaagaccttattttcaatgagtgaaaataatataatatgtcttatcctttatacatctatcacatgaagcttctagtatatctgtttattgaatatcgtcccaccaatgatttccatctctgcttaataataaatcactttcgatagggccatttgtccctgatttataattagggaagtttggatcaatcatggtccaatgttcttgaatagcgtctacaaatttccatgtagatttaagttcttcccaatgtgtaaagttggttgcatcacctttaagacaatcgaataacaagttttcatatgcatctactgtgttcattttatcttgtgcactcatagcataagacagttgaacaggctttgtttcgataccttgaatacttttcttagcatttaagtgtaatgaaatcccttcattaggttgaatattaataactaataaattagaatctagtagtcgatccgtttgataatataaattcataggaacttctttaaattctacaacaacttgtatacatttagacttcatacgcttaccagtacgaatgtagaatggtacaccagcccaacggaagttatcgatagttaatcttccagaaacaaaggttggtgtattggaatcagacgcaacacgatcttcatctctataagcgataacacgttggtcattaatagtcccttctccatattgtccacgcacaaagttttgattgacttcttcaggttttaattgtcttaaagattttaatactttcaccttttcagctcgaatatcttcacttttaagactaataggtgcttccattgctagtaatgcaaccatttgtaacatatggttttgtaccatatcttttaatgcaccgctcgattcataataacctccacgatcctcaacacctagtatttctgaagaagtgatttggatattagagatatacttattattccaaagaggttcaaacatcgcattagcgaatcgtagaacttcgatattttgcaccatatctttaccaagatagtgatcaattctgtatatttcttcttctttaaatgattgtcgtaattgattatttaatttttcagcagatttaaaatcactaccaaatggtttttcaattacaaggcgtttaaatcctttagtttcagttaagccagaagcttttaaataatcagaaattggtccaaagaattgaggtgccattgctaaatagaataggcgattaccttctaatttaaatgtatcatcaagttcattagagaatgttaataattcatgataactttcttcttcattgacatcatttttaaaatagaaaacatgttctatgaattcatcgagtcgatcagtatctttgacgtgcgtttgaatagattgtttaacttgttcacggaaaaagtcgttagtataatctcttcgaccaacgccaataatggcaatatggtcatctaaattatcttgttgatataaatggaataaagaagggaataattttctatgactcaaatctccagttgcgccaaatatagtaattaaacaagggatatgtttagtgtgtgtgttcaaattcaaaacctcaattctttaattgctatgattaattcattataaattaaaactgtttttcttgatatgtttttgcctaaaattgttgataatatttacaacattaaactaaataacatacaatttattttttataagttacattataccctaaattctgataaattcatttattttatttcatatgataacaaacttatagacgtatgataaaatatattattgaagaaagaggaggcaaatgcatggaagttacattttttggaacgagtgcgggtttacctactaaagatcgtaatactcaagcgattgctttaaatttagaaccttattcaaattcagtatggttattcgatgtaggagaggggactcaacatcaaattttgcatcactcaataaaattaggcaaagttgatcatatttttattacgcatatgcatggcgaccacatttttggattacctggattattaacaagtcgttcattccaaggtggagaagataagccattgacgttaatagggccaacaggtttacaacaatttattgaaactgctttgaaattatctgaatctcatttaaactatcctattacatatattgaaattgataataattttacatatcatcatcatggttttacagtttcatcaaggttattaaatcatggtataccttcatatggttatcgaattgaggctcctacaacaccaggtacaattgatgtaactgcattaaaggcaattggactagaaccgggtcctaaatatcaagaagtaaaaatgtttgatacttttgaatataataatcaaatttatctttctaaagactttaaaggtccagccaaaccaggacctattgttactatttttggagatacgaaaccgtgtgacaacgaatatatacttgcagaaaatgcggatattatgattcatgaagcaacatatattgaaggtgacaaaattttagcaaataactatcatcatagtcacattgatgatgtatttaggttaattcatcagtctaatgtgaagaaaagttttattacccacctaagtaatcgatataatttagaagatatagaagagataaaccgtgcattaaaagaaatgaaagatacaccaaactttgagtttgttaaagacttcgatacattcaaattttaaataatattagcgttttataatgatacgtaaaaactcataaaaagctataacgatatgtatgacttaattttcgttatagctttttttattactcatcttcacttttagaaagggcaatacttctatgaactgccgcgtctagacaggctttaaaaatactctcaatatcatgtcgatcaagttcatttaatccagcttgtgttgtaccacctttagaggtaatattttttctaagttgttccatacttaaatccgatcgttcaatcatcttacttgttccaataatgagattcttaatggattcttcaacttgtttcttttcaagacctaatgatgttcctgctttaacatattgttcaaatacgtgatataaaaaagctggtccgcttcctgtaatagccgtcacttgatgtaaatattcttcgtcaacttcaataactgagccaaaagcactaattaattctgttacttcatctttagaatgaggatcgaaattaccagaaaaactaatacctgtcactgaatgacctacctgtgcatttgtattaggcataattctagcaacaggattattcgtttctaacttttctcggatataatttatcgataaaccagccataatagatataaaacgatggtctgattgtatatgtgatttaatacgtgatgcgaccgtttcaaaatcatgaggtttagtacctaaaaaaacataatctgcatcttttaataaaaatgcatcatcgtaactgtattttactcctaattctttcgcaaataattttaaagtattctcatttgatttatttgttaaataaatatcgttatgatttaatattttagaatcaataattcctttaaaaatggcttgtgccatgttaccagcgccataaaatactaacttcataaaatagcaccatccttacccttaattgataaaactatagtaacatattcattataattattatcaaaaattaactatacttgttagataggagagactcatcagtgattgtaggtaaacatttcatcgtaactggaggaactagtggcttaggtttagaaataacgaaaaaattattaaaaaaaggtgcatatattaccctcattgttcgtagtacggagaaattcgaaaatattaattttaatccgtacaaacatcgtgtttcaatgattaaatgtaatttacaagatacttcacaaatagatactatttctaaatccctttgttatccgattgacggaattatttatagtgcaggtttaggcttttttaaatcaatacaatctcattcgttagaagaaaccttggagacttatgatgtgaatgtgcttggttttattacattatttaaaactgttaaaccatatttaacaatgaatgcttctatagtggctatttcaattcaggcagcatttgtaacgcaagcgaacgctgcattttatggctcatctaaagctgctttaaatggcgtattaaatgctctaagaattgaggagcaaggctttcatgttatgactgttaatccaggtcccattaatacaccatttcacaaaaaagcagatccatcattgaagtacgctaataaatatgcatcactaatgatagatcctaaaatactcgcagaagatatcgttaaaggtatcatcactcgtaaagtagaaattaacaagccgctatggatgaatccactattaaaactttaccaattagctcctagaaaaattgaaaaatattttacttcattgtttaaaaataaaatataatttaacctaaaaaaatgatgaagcattcatcatagatacttcatcacttgtactttacatcaacgattgtttataagaatttattaattaattactcaagatgctgagtatattctaaatctttcacgcggtgacgtgcagatttaatttgatccaaacttactgttttattaaaattagtaatattatcttttaattgtgaaacagaacttgcaccaacaataatagatcctaatgcatcatgggattttaaatattcgaatgataaagcacttaaattactttcaacttccttaacagaagcaatcgtttctcctaattcatgataattatagtcaaaaataccatctgagaatttctgatcaagtacattaacactatttgaagtaagtaaccctttaaacacgggaccacgtgctaaaacttttacaccatgagaatgaatgtgattcaaaagacgttctggacgattatcaataagattaaattgagacataatcgtttctatttgactatgttttaaataatactcaatcacgttaggtctaatagaagaaattccataagctttgattacaccttcttttttcagttcatcgaatgcactaatcgtctcatctaggggatcatcaattgtaccaccgtgaagttgataaagatctaactgttctaaacctaaacgttttaaagaacttttaacactttctttaatatatttttttgaaggatcccaagtagtactaccatcattaagcggtctatttcctacttttgttcctataacaatatcatctctattttgatatttctttaaagactttccaacaatgtcttcattgacacctctatcataaatatctgcggtatcaaaatatgtgataccattttcaattgcacactcaatgatttcctctgcgtgatggtattctgtgcctaaactcatacaccctaaacctagttccgaaatttcaatgccactttttaatatatttttttgcatgaacaatctccttccgatacactttagttaacgcatttatcttatcaatttattaacttaatgaaaagggacgtggatataatggactttaatgaaaaaacttttgatagaacagtcatttataatggtaaaattatcgatctagaactacacgatgtggagttaccagacgggaaaacttccaagagagaaattatcaagcataatggtgctgtggcaatttgcgctattactccagaaaaagaagtattattggttaaacaatatcgtaaacctattgaaaaacccttgttagaaattccagcaggtaaactagaagaagatgaagaaagagaagaagcagctaaacgcgaattagaagaagaaactggctacaaagctaatcatctaacattcatcactcatatgtatggttctccaggattttcaaatgagaaactaaccatttattttactgataatttaagtgaaggagaattgaatctggatgatgacgaatttgtagaattgcataaaatacacttagatgatatccatgcacttttagaaaatcatgaaattgaagatgcgaaaacaatgattgctttacaatatgtattattaaattataatcattctaaataagacgtgataactacttgatttttactaaatttattggtaatttattaattgaaataatttaatttaaaatgattataattaattgaggagtgatgctcccgtggaagaacgtctaaatagagtaaaacaacaattacagcaatcttcttacaaattaacgcctcaacgcgaagcaacagttcgtgtgttaattgaaaatgaaaaagatcatctaagtgctgaagacgtatatttaaaggtaaaagataaagcacctgaaataggtttagctactgtttatcgaactttagaactacttgctgaattaaaagtagtagataaaattaattttggtgatggcgtagcacgatttgatttgagaaaagaaggtgctaaacattttcatcatcacttagtttgtatggaatgtggtaaggtagaggaaattcatgaagatttattaccaaaagtggaagaacgtgttgaatcagaatatcaatttaaaattttggatcatcgcttaacatttcacggtatatgttcagaatgtcaagctaaaggtaaataataagttaaacctaataaagtgttgtatcaactttatatgcaaatgcctagaagagcttttcaagataaaaaaaagtgatatgtaataattaatcgatagaaggtgtgaaattaagaatcaactttgaattctatttcataccttttttatataaacagaggtgtaatatgaatacgattattgaagaattcttaaaatttattcaaattgaaaagggattgagtgacaatactatcggcgcatatcgacgcgatttagctaaatatgaagagtacatgaaagaacgtaaaattgctcatatcgattttattgatcgccaagtcatacaagaatgcttaggatatttaatagaccaaggtgcttcagctaaatcaatggcgcgttttatctctacaattcgcaattttcatcaatttgcacttagagaaaaatatgccgctaaagatccaacagtcttaattgaaactccgaaatatgagaagaagttacccgatgttttagaagttgaggaagtacttcaacttttagaaacaccggacttaaataagaaaaatgggtatcgtgatcgtacaatattagaattattatatgcgactggcatgcgtgtttcggaactgatacaaattaatattgaggatatcaatcttattatgggatttgttagagtatttggtaaaggtaataaagaacgaattataccattaggagacactgtgattgaatttctagatacgtatttagaaaaggtacgtcctcaacttttgaaaaagactattacgaatgtattatttttaaatatgcacggtagacctttaactagacaaggaatatggaaaatgattaaacaatatggtttgaaggccaatattaataaaactttaacccctcatacgttgagacattcatttgctacacatcttttagaaaatggggcagatctaagagcagttcaagaaatgcttggtcattcagatatttcaacgacacaactttatacacatgtgtctaaatcccaaataagacaaatgtataatcaatttcatcctagagcttaaaataaaagaaagaaaagtgaattatttaacttttctttcttttatttttaagtgctttttttctagctgcaatgatatcgcttctatctcttagacgatgacaatgaacaatcatgtcatcattgttaatttgtttcttatattcataattaggatataaattgataagttccctttctattgaagatgtaattggcaactgtattggttgaaatgtctgatcatgtttcactttttctatttgattttgaatcaataaagtaaattcattgacctttaaacctagtgtatccttatcctttgcatgcttaaatgtatataacgcttttttaaagctttttaatgcacctaacttattacatcgtctatagtgatacatggcagttgaaaatagtattaaactcactatagcatctttcttagaaaaattagggttagacttccataattcttctaaaatatcatgacataaaaaataatgttggtgtgtatgaaattgatagtagaattgacttaatgctttattcatgaatactcccccttaatttaattctaatatatattcatgctataatatttaggtgaattatgcacaatttagattttataatacaaggaagttaatttatgtacgaagttaaattagatgcttttaatggcccattagatttacttcttcatttaattcataaatatgaaatagatatttatgatataccaatgaaagctttaactgaacaatatatgcaatatgttcatgcaatgaaagaagttgaaattaatattgcaagtgaatatttagtgatggcttcagaattattaatgataaaaagtagattattattgccacaacaagaaactgaaaatgacttagaagaagatcctcgtgaggaccttgtaggtcgtttaatcgaatatcaaaattataaagaatattctttactattaacagaattaaaaaaagaacgagaattatattatactaaatcaccagctgatttatctcacttggaaaaagaaacgcattgggacaaaaatcaaacgattgatttgactcaactgattgttgcataccaaagagtaaaaaatagagtagcattaaatacgccaaaagcagttgaaatttcaaaagatacttttacaattcaacaagctactgaagtggttgctaaacatttagagaaacaaacagcatttaacttctttagtttatttaactttaatgaacctgtgagtaaagtcgttacacatttcttagcaatattagaaatggctaaagcaggtcttattaatatagaacagtcaaataactttgaagacatcaatatcattagaggagtgaactatgcgattggataaccttggaattatagagtccttattatttactgtaggcgatgaaggactggaagcacgtcagcttgcagatattttaaaaatggatttagatgaacttgatcaattaatttcgacgtatcattcaaaaggtcttgaaatacaaaggtatggttccatttatatgttaacctccaaaaaagagtgtgcaccttttatcgaagtactagtgaagcaaaaagcaaacatgaaattatctcaagctgctatggagacactatcaattattgcttataatcaaccattaactagaagtgatatcgaaataacaagaggtatcaattctgatggtgcagtgagaacattaattgctagaggacttattgaagcaaaagacatggagaattcgcggagtcatttactcatgactactgatttatttttaaatgtttttggaatgaaatcaatagaagaattaccatctactgaagaagataacgaagagattgagaatttctttagtacacttacaaatcaaaaggagaaataaaatgaataaagatttagaaagacttcaaaaacgaattgctaacagtggatatacctctcgaagaaaggcagaaactttaatcactgaaggtaaagtgaaagtaaatggtcaagtagttacagaacttggaacgaaagttaaatcttcagacactgttgaagttgaaggaattaaaattgagcaagaagataaaatttatattctgttctataaaccaacgcaagttattactagtgtttcagatgatagaggtagaacggttgtaacagattattttaaagatttagaagcaagaatttatccagttggacgattagactatgatacttcagggttattattacttacaaatgatggtgaatttactaacctaatgactcatcccagatatcatattcaaaaaaaatatgttgcaaaattaaaagggtatttaatgagagaagaagttaaatcattagaacaaggaattgaattagaggatggttttacacaacctgctcaagttaaaataaaaaatcaaaataaagaaaaaaatacgacactggttgaaataactattagcgaaggtagaaatagacaagttcgacgtatgttcgaacattttaatcacaccgtcgataaattaatacgaatcgaatttggaaatcttaatttaaaaggattaaatgcaggtgaaggtagagtattaacacctcatgaggtgaaaatattaagacatatggctgaaaatggtaattaattcgaaataacttaacaatacaaagtatattctcaattacaatgtgtattctttttttatttattcactgtaataataaatcataggttctacattaaaaaagatattttgatatttttttcacaaagtcaattgaatagaaagctttaatatagtgaatatgctataattaaaacggtatagagcatgtgtaggaggtatattgtaatgacgaatgaaatattaattgtagacgatgaagatagaatcagaagattattaaaactttacttagaaagagaatcgtttactatccatgaagcaagtgatggtaaagaagcatatgaacttgctatggaaaatgactatgcgtgcattcttttagatttaatgttgcctgaaatggatggtattgaaatgtcgtcaaaattacgtgagcataaagatacgcctattattatgcttacagctaagggcgaagaaactaatcgtgtggaagggttcgaatcaggtgcagatgattatatagtgaagcctttctctccccgagaagtcgtattaagagtgaaagcattactacgtagaactcaaacatctaaaccagaacaaagcgaaccacatgcaagagatgtcattgagtttaatcatcttattatcgataatgatgcgcatcgtgtattagcggatcaacaacaagtgaatttaactccaaaagaatatgagttattaatatacttagcaaaaacacctaataaagtatttgatcgtgaacaactattaaaagaagtttggcattatgaattttatggtgatttaagaactgtagacacacatgttaaacgattaagagaaaaattaaatcgagtttctgaagaagcagcacatatgattcaaaccgtttggggtgtcggttacaaatttgaggtcaatacaaatgatgaatcgtctaaatagtgttgttataaaactgtggttaactataatatttatagtaacgacagttttaattttattaagtgcagcattaattacatttattcaatattattacacccaacaaacagaaaatgctataagagaagatgcttcaagaattagtcaccttgttgaaaaagctgataacaagtcacttgccatacaacatagtcaggaattgattgatggcacaggtggcgttattattatgtctaataaaaatatgtcagcagaaaaatcatataatttgattaaaaaaagaatgttaaaagaaattcaaaacaacgacaactttaataaagtatttaatacagggaaatctgccacacaaaatgtcacaataagtgaaaaagggacatcccattcttatattcttttaggatatccgatgcaatctcaagatcgtaagcatgctaagtttagcggagtatttatatatcaagatttaaaaacaattgaagatactaataatgcaattaccattattattttaattactgctattgtattttttattgtttcaacgatttttgcgttctttttatctaatcgtattactaaaccacttagaaaattaagtacacaggcaattaatgtatcgaatggagattactctcaaaaaacaaccgtaaatacgaaagatgaaattggtgaactttcttatacttttaataatatgagttataaaattcaagagcacattgaagctttatctactcaaaaaaatattcgtgatcgtttatttaattctatgattgaaggtgtagtgggtttaaatgataaaagtgaaattattttatctaacaaaatggcagaccaaatactaccgacaattgataaatctatttattcagaaattaaaaatcaaattaatgccacgtttcattcaaaaggcacagagtttaatgaatatgcaataaactctaagtattatgtatttataatgagttatattgatcgtattcaacaagatggtcgtagtggaattgtaatcatcataagagatatgacaaatgaacataatcttgatcaaatgaaaaaagattttatcgcaaacgtatcccatgaactccgtacaccgatttcgttattacaaggttatactgaatcgatagttgatggcattgtaacagaacctaacgaaatcaaagaatcactatcaattgtattagatgaaacaaaacgacttaatcgccttgtcaacgagcttttaaatgttgcaagaatggatgcggaaggattaaccattaataaagaaatacagcccataatgccattattacgcaaaatacaacttaaataccgtcaacaagcacaagatttagaactaaacatagacttgttaccaaatattaatgaagatgatttatggaattacgatgctgatcgaattgatcaagtactcacaaacttaattgataatgcaacacgctatacacaccctggagattcaattacgattactgctaataaagatagtcagtatcaaattttaaatataaacgacacaggtagcggtattgctcctgaacatcttgatcatgtatttgatcgtttttataaagtagaagcttctagaactaggggtaaacaaggaactggtttaggattatttattagtaagatgattattcaagagcatggcggaattatttctgtagaaagtacagtgaataaaggcacaacctttattattaaattacctaaaccttctatagattctaaataattaactttcaacaaaataggattaaatatccaaattttttgagattatgttcttcaaagttaaagataaaactttgaagagcatttttatatctatagttttttaaatataatatttcatgtcatattaatttaaaatcagtcgatgaaactgatgaaacatatctctcatttttataaataaacagacacattgcaatgaaagatttattcgtgtaatataaattttaaatgataaattcaataattcatcttcggggtagggtgtaattcccaaccggcagtaatttgagcctgcgacccgcttcaataaaagtggctgattcagtgtaaatctgaagccgacagtatagtctggatgggagaaggtggaggttttttgttgtgtaaacgtatcctccaattcttagtaagatgaatggaaggagaaaactgaatatgcaacaaaataaacgtttaattaccataagtatgttgagtgcaattgcattcatattaacatttttgaaatttccgttaccatttttgcctccatacttaacattagattttagtgatgtaccgactttattagctacttttatttttggtcctttatctggtcttcttgtagcattaattaaaaatatattaaatttcttatttaatattggcgatcctgttgggcctgtggcaaattttttagctggagctagttttttactaacagcttattttgttagtcatcgtaaacaatattcatctcgtcgttcactaattataggattagttgccggtactattgcaatgactatcgttttaagtattttaaattattttgtcttactacctttatatggtatgatatttaatcttggtgatgtgtttactaatttaaaagtaatcattttatctggtattattccttttaatattattaaaggatgtgtcatatcaatcatttttatcttgctatatcgccgtttaaaaaaagtattgaaataaaattaaaacctccgatgacttctaagtaggaatcattggaggttttatattataattatggtaatacaattttatttacagatttattcaaattttaaggcatctccatcaaaaggctcttcttcaattttaattgaatcagttggacagccttcaagagcatcttccatatcttcatataattcttctggtacttctgcagtaccttgattatcgtcaaggattacgaaagcaataccttcgtcatcataatcgtaaatatctggtgcagcagcgccacaagcaccacaagcaatacatgtatccatatcaacgattgtgtactttgccattttattcgcctcctttgataaaaatgctacactagtcataataaataattttattatattctagatataaaagttctataaaagaggagttcactcatgcaagaaatgattagttatgttaaacatcactcattcaattataaaactaataaaagtatatataatattttaagtggaaaaaagtcacatcaaacgttttttgatgcgagctctcaacaacttttatcattatatcatagtttacctaaattaaaatatcagacatttgaacgacttttgaataaaaatgatataaaagaattaaatatcaaggtgcatcctcggttcacttatgacagtcttaataatacttttaaatgtattcaattattaattcagacgatatctcaatatctccatcatcaacttaaattcgtaccaatgaaccaacaagttattattcaaaataaagttaaaaagatttatggaactattattaaaaatgatttaataaaagattttgaaaatgaagtgactgatttatttcaagcaatcagtttaaataataataataagtgctaccttcattattatttgcatggttatgatgagcctatgtatacaagacaacaggtaagtttgattgagaatatttctatttcaaaattatatacattagaattgaataatttagtcaccttaggaagtgaaattgaaaataaacaacgttatcctatattgtctgaatgtattattctttcatcattattaaataaaacatctattactcaacaatatcttcatcaaggtttgagtttaaatgaaattgcaattgcacagaatgttaaactcaatacaatagaagatcatattttagaattatttattaaaggctatgagaaaaattacgaaaattacgtagagaaaaaagatgtttttcaatttactcaatactatacagagcataaaggagaaagattaaaaatatataaacaagagtttgaccatttatcatactttgaaattaaactcatgattgttgggatagaaagaggtgaaatcaatgttagagaacaatcttaaacaatggtttggacatgaaagttttcacccaggtcagaaagaagttatagaaagtgtgttacaaggcaatcatacacttggtgttttgccaacaggtagtgggaaaagtctgtgttaccaatttccaacttatatgcaacaaaaacctactcttattatttcaccgctaatttctttaatggacgatcaagtgatacaacttaaatctcaaggtgaacgaaaggttgtatgtattcattcaggtatggatgaacaagaaaagaaggaaaatatcaatttattaaatcaaagtcgttttatatttctaagtcctgaatttattcttcaatctcatcatttcaatttaattaaaaacatcccatttggtttagtagtattagatgaagcgcattgcttatcagaatggggatatgatttcagaccgcattacgcacttatcggtcaaatcactcatcattttaaattagcgactattttagcattaactgctactgcaccgccacatttaacaagtgatttagaacatattttaaaagttaaattaaacactatacaaactactatgaatcgtaaaaatatttcgttatcacattttaatttcaaggatgacgacgaaaaaatagaatggttattgaaatttattgaatcttcaggtcccacaattatttatgtatcatctaagaaaatatgcttacaactcgcaaaactcatttatcaacatggatatttaactggtatttatcatggggatttaacttatcaagaacgtcaaactgttcaaaatcaatttattaataattttattccagttattgtagctactagtgcttttggaatgggggttaataaaaaagacattcggactgtgattcattttcatttatcatctagtccttcaaattatttacaagaaattggaagagctgggagagatggaaaacaaagtcaagcgattagtctatatcaaccagacgatgcttatattctagagacgttactatttaatgatgctatcgtaacagaagatgtcgaaacttttgagctaggcgcattccttccacctaataaagaagaaattttaacagtattacaccaaaattatacatttaaagaattgaaacacatttttaaaacctcatatatacgtaaacaagctggttatcaaagaattataggttatactcgtatagatcaatgtagaagaaaatttttattggaattttttggagaatctcctaatcaacctaatgaatgttgtgacaatgattcagatttaagtaaaattgagtgttacaacagaaaaaaagttaaaagacaatttactttcaatgaaaaaattaaaaacttatttagagtttagtgactttactttactaaaatattttatacaggatataattaaattacatagtgatttataagaaatttaaaaatgatacatatttatgcattacttgggtataaataatgtgacaattaaaataagaaaaagagaggatgttgactatgtctagagataattttaaggatgattttgaaaaaaatcgacaatcgatagattcaaacgatcaattcgatcgtgtaaataatgaaactaacgatgaaatagacaattttaacaatgaaaccgatcaacagtttccaccaagaaatgcacaaagacgacaaagaagaagaaaccaatcttctagtcgtaacaaaaaatttaacgatcaggttaatgattatgaagaaggttcattagatgaccgttatgatgaggagacatttgacaaagtacataacgataataattctcatcataatcacgagaatgatgagaataatcaacgttccgatgtagatgagcgttatgatgaacataatcgtcattctaatcatcgtcttgaggacgatagttatgaaaatgatgataatagtgatgatagaatgaatagtgatcatcgtcgtcatcgtgattttgatcaagataacgatagacatgaagctcatcattcaaaaatcggaaaagacgcaacaattgctggaggagctgctgctacaggagctgttggagcaaaagcatcacgtaataaaaaacgtaaaaataatcgtcatgatgatgaaaattatagagataatgaaaatagaagtgttcaacataacagcgaagataataatgaactagataataaacatcacagaaaaaaaggtaataaaggcaaaaaagctgctgcagtcggtgctggcgcagctggagcaggtgctgctggtgctgccgcttctaaacataaacaacatgatgaacataacaatctaaatcatcatgatgctgataaacatcgtgaatacgaagataatgatggtttccaagcacataacggtaataaaaaacgtggtttaatgggaattttacttccactcatagctttattacttattttagctgctctagctatttttattggcatgtatcttaacaatgaccataaagaaaaaaacaataacactgcagataataaaacagaacaaactgagaacaaagataacgctaaagacaaagctacaaatgaaaaagaccaatcaaatgaaaaagtagcaacaaaagaagataaatcaagcgaatcagataatagcactaaaaaagatagtaatgagtcaaatgaagtagctacaacagaaaacagtacatcaaacaataataatgataaaaattctactgaaagtgcaacatctgaaaatgataacaataaatcaaatgtatataacaattcatcaagttcagacaataactcaaattctcaatcaactcaaaatagcacacaatcaagtaatagtgctggccaacaaactcacgtagtatctggtaatgataatttatatcgtattgcaattcaatactatggtgaaggtacagttgaaaatgtaaataaattaaaacgagctaacggcttaactagtaataatattgtaaatggtcaaaaattagttattcctcaataatatctgaatgtattaaaaaaggtacacctaaaatggtgtatcttttttatgttcatttgaagataagtaaataacaatgtaaatatttttatttagaaatatatctgtaaactgatataatatgttagtgattaaaggaggccattaaacatgcaaacaattgaaagtattattattggtggaggcccatgtggtttaagtgcagcaattgagcaaaagaaaaaaggcatagaaacactagtaattgaaaaaggtaacattgtagatgccatttatcattatcctacgcatcaaacttttttctcttctagcgataaattaagtattggagatgtgccatttattgtagaggaaagtaaacctcgtcgtaaccaagcacttgtctattatagagaagtagtaagatttcatcagttgaatgtacatccttttgaggaagtattaacagttaaaaaaattggaaataaatttacaattacaacaactaaagacgtgtatgaatgtaaatttttaacagttgcgactggttattatggtcaacataatactttagatgttaaaggtgcggatttatctaaggttaaacattactttaaagaagctcatccatacttcaatcaagatgtcgtggttattggaggtaagaattctgcagtagatgcagctttggaattggaaaaggctggggcaaatgtgactgtattgtatcgtggagatcgatattcagcagcaattaaaccttggattttgccaaactttgaatctttagttaaccatgaaaaaatcgatatggaatttgatgcaaatgttactgaaatcactcaacattcagtaacttatgaaaaaaatggtgaaacagtaacaataccaaatgactttgtttttgcaatgattggttatcatccagactatgagtttttacaatctattggtatagatattcatactaatgaatttggaacagctccaatttataataaagaaacgtatgaaacaaatgtggaaaactgttatattgctggtgttatagcagctggtaatgataataattcaattttcattgaaaacggtaaatatcatggtggtattatcgctcaaagtattttaagaaaaaaacaaactccactagaaagttaaatttcatttattttaattaaaagagagaaacaatgagtgcatcatcattgtttctctcttttttaagtttcaaagtattctttcaattccttatgattcatatggttacttaaaccaattaaaagttttaatcttgctttagggccatttaatccgttagaaaaaataagaccctcttcagctaatcgaaaacctccaccttcataatcatatactggacttacaatgccattaaatgagcgagacacgagtacgataggaatatcttttttgacacatgattcaatacctttcaaacaacttggaggtaagttaccttggcctaacgcttcaataattataccttgaacgttttgttgagcataaaattctaaaacatcattagtcattcccatatacgctttaattaatggcacatttaaactttcatctattcttggaaatactttttgtcgatatggacgattataaaattgaacacgatctttagttaagatacctaaagggccttgattaggactctgaaaggtattgatattcgaggtatgtgttttagtaacatttctcgcagtatgtatttcgtcattaaatacgaccatcacgcctttatcagaagcttctaatgaagttgcaactctaattgctgagataaagttatatagcccatctgaaccaatctcgtttgatgaacgcattgcacctgttataacaataggttgacttatatcgattgttaaatcgagcaaataagctgtttcttctaacgtatctgtgccatgtgtaatcacacatccatcataatgattcttagaaaattccttcataatgatatcttttaactttatgacatgagaaagtgtgatatgtggtgatggcacattaaagggacttatttcatatacatttgcatattgatctatgatgtttttatgcaatgaaataggattgatatcatttgtaacgacctgattgagttgattttgagacatactaattgttccacctgtatgaataacaagtatctttttcattaaactcctcctatttttaaaatatatatttatgataaaataatacagataaaacaacaagaaaggaaaaatgttatgaatccaattaatattgcattagatggtcctgctgctgctgggaaaagtacaattgcaagacaagtagctagtaaattatcaatgatttatgtcgatactggtgcaatgtatcgtgcaataacgtataaatatttaaagcaagatgctcctgaagattttcaaaatttaattaatcatacttctttagaattaacttacaatccatcaaaaggccaacgaattattttagataacgaggatgtgacagactatttaagagaaaatgatgtcacacaacatgtttcatatgttgcatcaaaagaacctgtacgcacctacgccgtacaaaaacaaaaagaattagcaataaaaaaaggaattgttatggacggtagagatattggtaccgtcgttcttccagatgctgagttaaaagtatatatgattgcctctgtagatgaaagagcggaaagaagacaaaaagagaatgaattacgtggcattccttccactttaaatcaattaaaaaaagagattgaagaaagagatcattacgatatgaatcgtgatatttcacctttaagaaaagcggaagatgctataacagtggatacaacgagtaaaactatagaagacgtaactgaagaaatattaaagttagtaaagaatctgtaattttcatacatagctatttaatttaattcgtcaaatgactaaagtataagcgaattattttaaatagctattttagttatatataattaattatgaaaatataaacaataaattttcttagtcttatattcaatcataagtttcgatttttatcgatattaataaatatatttttctattgcttaatattaaataattttaaaaaatgatatattttttaaaaacttatgaaactaaaggggtatttcttgacaattcctcgtgtttataagatgttatagttatgtagtgtataaggaggcaaacatgatgactgaagaattcaatgaatcaatgattaatgatattaaagaaggtgacaaagtcactggaaaagttcaacaagttgaagataaacaagtagtagttcatattgatggggctaaatataacggaattattccaattagccaactttcaactcatcacattgaaaatccaagtgagattatttcagagggtgatgaaattgaagcatatgtaaccaaaattgaaattgacgaagaaaatgaatcaggcgcttacattttatcaaaacgtcaacttgaaaccgaaaaatcatatgaatatttacaagaaaagcttgataatgacgaagtaatcgaagctaaagttactgaagtagttaaaggtggcttagttgtggatgtgggccaaagaggattcgttcctgcgtcactcatttcaactgatttcattgaagatttctctgtatttgaaggacaaaccattcgtcttaaagtagaagaattagatcctgaaaataatagagtcattttaagccgtaaagcagttgaacaagctgaaaatgacgttaaaaaagcatcgttattagattcacttaatgaaggagacgttatcaaaggaaaagttgcacgtcttactaactttggtgcttttgtagatattggtggcgttgatggattagttcacgtatcagaattatcacatgagcatgttcaatctcctgaagacgtggtaagtgttggacaagaagtagacgttaaagttaaatctgttgaaaaagattctgaacgtatttctttatctattaaagatactttaccaactccattcgaaaatattaaaggtaaattccacgaaaacgacgttatcgaaggtaaagtaattcgcttggctaactttggtgcttttgtggaaattgctcctggtgttcaaggacttgtacacatttcagaaattgctcataaacatattggtacaccaagtgaagtgttagaaccaggacaacaagtgagcgttaaaattttaggtattgatgaagaaaatgagcgtatttctttatctattaaagctacattaccaaatgaagatgtgattgaaagtgacgaagctacaactcaatcatatttatctaatgaaacagatgaagacaatccaactttaggtgacgtttttggtgataaatttaaaaacttaaaattctaatattaaatattttattatttaatttaatgatgagagcaagaaaagatattcaaatagaattctttcttgctctttttttatttatctttactcactatctatcgtatgacaatatatacttgtttttaaatcatcattgcgtatgataaaattatagagattttagaaagagaggaagttagcttatgactaaacctattgtagcaattgtaggtagacctaatgtggggaagtctacaatttttaatagagtagtaggtgaacgtgtatcaattgttgaagatactccaggtgttacgcgtgatcgtatttattcttcaggcgaatggttaacacatgaatttaatatcattgatactggaggcatcgaaatcggagatgcacctttccaaacacaaataagagctcaagcagaaatcgctattgatgaagcagacgttattatctttatggtaaatgtgagggaaggtctcactcaaagtgatgaaatggtggctcaattactttataaatcaaaaaaacctgttgttttagcagtaaataaagtagataatcctgaaatgagaagtgatatttttgatttttactctttaggttttggcgatccttatccaatttctggttcacatggtttaggtctaggtgatttattagatgaagtcgttaaacattttaaagaagaagatagtgatccatatgatgatgacactattcgtttatctattattggccgtccaaatgtgggtaaatctagtttagtaaatgccattttaggtgaagaacgtgttattgtatcaaatgtagcaggtacaactcgagatgctgtagatactgagtatagctatgatggacaagattacgtgttaatagatacagcaggtatgagaaaaaaaggtaaagtatatgagtcaactgagaaatactctgtattaagagccttaaaagcaattgagcgttcaaatgtggtgttattagttattgatgccgaagaaggaattattgaacaagataagcgcgttgctggatatgctcatgaagaaggaaaagcaatggtgattgttgtaaataaatgggatgctgtagaaaaagatactaataccatgaaaaaatttgctgatgatgtacgtaatcaatttcaatttttagattatgcacctatcgctttcgtatcggcaaaagagcgactacgattaaaaacacttttcccttatataagagaagcaagtgaaaatcacaaaaaacgtgttcaaagctcaacacttaacgaggtggtgacggatgcaatttcaatgaatcctacacctacagataaaggtagacgtttaaatgtcttctatactactcaagtggctattgaaccaccaacatttgtggtttttgtaaatgatgttgagttaatgcatttttcttataaacgctatcttgaaaatcaaattagagatgcatttggttttgaaggaacgcctattcatatcatccctagaagaagaaactaagaggagagattaagatgactaagattacagtttttggtacaggaagttttggtactgcattagcaaatgttttagcagagaatggccattcagttttaatgtggggaaaaaatgaaaatactgtagatgaaattaatcaatctcatcaaaataaacggtacctgaaagacgtaacattaattgaaacaattaaagcaacaaatcaattagaacaagcagttaatttttcagatatatttttaattgctttacctacaaaagcaattagagacgttgtgactgaaattaatcaacatattaaaactaaaaaaacatttattcacgttgcaaaaggtattgaaaatgaaacatttaaacgtgtatcagaaatgattgaagattcagtatctaagaaccataaaaatggtgtgggggtactatctggaccaagtcatgctgaagaagttgtaattaaacaacctacaactgttgcagcttcgtcaaaagatgaacgtataagtaaacttattcaagatttattcatgaatgattacttacgagtatatactaataatgatttgataggtgtagaactaggtggtgcacttaaaaacattattgctgtagcaagtggtattgttgctggaatgggttatggtgataatgctaaagctgctttaatgacaagaggtttagctgagattagtcgactaggtgaaaagctaggggctgatcctatgacttttctaggtcttggtggcattggtgatttaattgtaacgtgtacgtctactcattcaagaaattatactttaggatataaattaggaaaaggtaaaacgactgaagaagcacttaacgaaatgaatatggttgttgaaggaatttatacaacaaattcagtatatcatttagcaaaagctcaaaatgttgatatgccaataaccaatgctttatacaaaatattatttgaagataaaccagtgaaagatagtgtgaaggatttaatgggacgagataaaaaagctgaataaagtgtaattttgctatttaacgcaaatattttataaaattattcacgaaatactgataattcaacgttttaagtatataaatcgttgcggtaaagggaattattgtgttaaagtcataccataatgatataaatttatcattatcattcatctggaggtgaactcataatgaataaaactgacttaatcaatgcggttgcagaacaagctgatttaactaaaaaagaagctggttcagcagtagacgctgttttcgaatcaattcaaaactcactttctaaaggtgaaaaagttcaattaattggtttcggaaacttcgaggtacgtgaacgtgctgcacgtaaaggacgtaaccctcaaacaggtaaagaaatcgaaattcctgcaagtaaagttccagcattcaaagctggtaaagcattaaaagatgctgtaaaataatttacttaaaaagccctataagggctttttattttatatattgtttaattctaaatacatatgttttatttataattgtacaattcactgtgaagcgtctgtgaagttattttcgtcataagcactatattttatttttatgaatataatgttaatatgtatattgatactaacgtgaggtgtgaacatggaaagaacattaagcaaattaaatagacaaattactcaaaggcttaaaggaattaatgaatatgaagcaattcacattaataaaggattaagtgatgttttagatcattttaatattccagaaaatgctaaacttgcctgcctcactattgatacttcaatgaagcatctagatgatatttctaaaaataaattatctaagaaatcaattctaattggtgacttattaagtgctcatttttatactttaatatctgaaattggtgatgtgtcatatcaaaagctaatgagtgaagcgattataaaatctaatgagcttaaaacttcattgcatcatcattcactcgagcgtcatgatatatataaggctgtgttagatatagaaacacttttcccttttataactatttctcattttacagatattgagatttctcaatatgaaatatttgaaaaattatttagtggggtacatcaatattatccctcttatttaagtgaatatgatgaagatgaaataaaccaatttattaaacatataaagcaaagcgataaagagaaaagtagaggtaataattaatgactgaaaataatgcaaaaaaagaacaagttcatacggtttttcaaaatatttctaaaaaatatgatcgattgaacaatataataagcttcgaacaacataaaatatggcgtaaacatgtaatgaaagatatgaatgtgttacctggaagtaaagcacttgatgtatgttgtggtacagcagattggactattgctttaagtagagcagtaggacctaatggagaagttacaggtttagatttcagtgaaaatatgcttgaagttggtaaagaaaaaactaaatcaatgcctaatattcacttagtgcacggcgatgctatgaatttaccatttgaggataaaacattcgattatgtaaccattggtttcggtttaagaaatgtgcctgattatttagcaacattaaaagaattaaatcgcgtattgaaaccaggcggtatgattgtatgtttagaaacaagtcaaccaacattacccgtatttaaacaagtttataaactttactttaaatttgtgatgcctattttcgggaaattgtttgctaaatctagggaagaatatgaatggttacaacaatctacattcaattttccagataaaactaaattaaagcgtttatttgagcaggctggtttcagtcatgtaaaagttcgtagctttacaggtggcgttgctgcaatgcaccttggctataaatagaaagttctactaaataaaaggtgattaatgtggcaaagttaagtatgaatagtgaaattaaaaatgttgaaaagcgtttaaaaaatgctattaaaagtaatgattctgtattacaagaagcagcatttcatttattatcttcgggtggcaaacgagtgcgtccagcatttgttcttcttagtagtcagtttggaccaaagaaaattactgaagatacgtatcatgttgcagtagctttagaattaattcatatggcaacacttgtgcacgatgatgtgattgataaaagtgacaaacgtcgtggtaaattgactattgaaaaaaaatgggatgtcactactgctatcctaactggcaatttcttactagctttaggtttaaaacaactttctaaaattgaagatcatcgtgttcatactattatttctaacgcaattgttgatgtttgtagaggcgagctcttccaattccaagaccaatttaatagtcatcaaaatattacgaactatttgagacgtattaatagaaaaacggcgttgcttattcaactttcaacagaagttggtgcaataacatcacaagctgataatgagacgattcgaaaattaaaaatgattggtcattatattggaatgagttttcaaattgtagatgatattttagattttacaagtactgagaaaaaattaggtaaacctgtgggtagtgacctaatgaatggtcatattacattaccagttttattagagatgaaaaaagacccagttttcaaaaaacaaattgctgagttatcacacctgacaaataaacatcaatttgacccacttattgatcaaatcaagaattcaaatagtatcacacaatctcaagaagtgagcgatcattatttaaataaagcactcgacttaattgatcaattagaggaaccaaattctcaaaatttatttagaaagcttattaaaagaatgcgttctagaaatacataagaatagaaaaaagttgaaaacgctttaataacctgttagtatttagtagtagtaggttgtttgctattaaatgtatttatacatattaaatcaattttttaattagggggatttgtataatggaacgcacttttttaatgattaagccagatgcagtacaacgtaatttaataggagaaattatttctagaattgaaagaaaaggtttaaaaatagttggcggtaaatttataattccaactaaagatactgttaacatacattatgctgaacatacagagaagccgttttttcataaacttgtttcttttttaacttctggacctgtgtttgccatggttgttgaaggagaagacgcagttgcggtatctagacatattatcggaaaaacaaatcccactgaagccgctcccggtactataagaggcgattatggtttaacagtagggagaaatattattcacggatcagactctgtagaatctgctgaaagagaaatcaatttatggtttaatgatgatgaaatatatagctacgaagctaatagagaaaattggctttatgaagaataatttttaaaaagtagaataaattggaatttattttcaattcaaccattgactgccgacatgttagaaagtacctaagacaacagttgtcttaggtacttttttatataaaattatttgaattttcaaacaccaattattctacactagttatgtaatttcattgaatatgatatgataacaaataatacataatactatttaaagtggtaaaggaaaggagctattaatcatgagatatttaacttcaggagaatcacatggtccacaactaaccgtgattattgaaggtgttccagctaacttagaaatgagagctgaggaaataaataaagaaatgtttaagcgtcaaggtggatacggtagaggacgtcgaatgcaaattgaaaaagatgcggtagaaattgtttctggtgtaagaaatggctttactttaggtagtccaattacaattgtagttaaaaatgatgattttactcattggagaaatattatgggtattgaaccaattagtgacgaggcacgtgaaaatatgaaacgtacaattacaaagccaagacctggtcatgcagacttaattggcggaatgaaatataatcatcgtgatttgagaaatgtacttgaacgttcttctgcaagagaaacagctgcacgtgtagctgtaggagcagtgtccaaaattttactttctcaactagacattcatatgtatagtcgtgttgtagaaattggtggaattaaagatgtagggttatacgatacagaaacatttaaacaaaatatcgataaaaatgatgtacgtgtgattgatgaatcgattgctcaaaaaatgagagataaaatcgatgaagctaaaaaggaaggcgactctataggtggcgtagttcaagttatggttgaaaatatgccagttgcagtaggtagctacgtgcattatgatcgtaaactcgatggacgcattgcacaaggtgttgtaagtattaatgccttcaaaggtgtcagctttggcgaagggtttaaagctgctgaaaaacctggaagcgaaattcaagatgaaattttatatcattctgaaagaggttattatagaggatctaatcatttaggtggctttgaaggtggaatgactaatggtatgcctatcattgtaaatggcgttatgaaacctattccaactttatataaacctttaaattcagtagatattaatactaaagaagattttaaagcaactatagaacgttcagatagttgtgcagttccagcagcaagcgttgtttgcgaacatgtcgttgcatttgaagttgctaaagctcttttagaagagttccaatctaatcatatcgatcaacttaaagaacaaattgaagaacgtagaaagttaaatatagaattttaaacatctttaattaacctttagaaatgaggtatatcatgcaattacaaaccacatatcacagtgataattatccaattattgtagaacatcatgcatttaaatatttatccgattatattcaagattacgataaagtattcttaattatagatgaatttgttgattttaattttagagataaatttgaaatattatgtcacaattcaaacattcaaaaagttatcgttcctgccggtgaaaaaatgaaaacgtttaatcgttatcaatctatcatggaacaactactaggaatgaaccttactcgtaatacatgtttagtggctataggtggtggggccacaggagattttacaggattcttagcttctacattattaagaggtgttgattttatacaagtacctacaacgatattagcgcatgactcaagtgtaggaggcaaagttggaataaattcttcccatggtaaaaatcttataggcgcattttatagacctaaagcagtcatatatgatttaaattttttaaaaactttaccttatcatgaaattttaagtggatacgctgaggtatataagcatgctttattgactggcgcagttgctacagaagatattgaaaaacacttttcagataggaaaacacttgaatcacttaaagatatggatcaatttatttttaagggcataaaaacaaaactaaacattattataaaagatgaaaaagaaagtaatgttagaaaatatttaaatttaggtcatacctttggacatgcagtagaatataagtataaaatacctcatggtcatgccattatgattgggatgatttatcagtttattgtggcaaatcatcttcttggcacacaatttgatattcaacattatattaattatatgaatcaattaaattatccgctggatttaattcagcagattgattttgaagaaatgtatcaatatatgttatcagataaaaaaaataatggtgaaggtattcaaatggttctactcgagaaattaggtaaacctaatgtatatcatgtagaaaaaaatatattgaagcaatcatttaaacaactacaattattagtagagtaggtgaaatactgtgacaacaagtcaaacaatagatattcatggtccattaaagggtgagatagaagtacctggagataaatctatgacgcatagagcaattatgctatcgtcactcgctaaaggtaaatcaattattgaacaaccgcttctaggtgaagattgtttacgtacaattgaaatttttaaactcttaggtgttgagattgaaattgaagaacatcgtcttattgttaattctccaggatatcaacatttcaatataccacatcaaacgttatatactggaaattctggtacaacaacgcgcttacttgctggtcttttaagtggattgggcatagagtgtgtcttatctggagatacatcgataggaaaacgacctatggatcgtattttaaaacctttaaaattaatgaatgcaaatattaatggtattgaaaataactatacaccacttattattaagccttcagccattaatggtatcaattatcaaatggaagtcgcaagtgctcaagttaaaagtgcaattttgtttgcaagtctattttcaaaagaagcatcacaaattacagaattagacataagtagaaatcatactgaaacgatgtttaaacattatcaaattccaatacaagtaaatcaaaaagtgattacaacatctccttatgctataagcaatattcaacctaaaaactttgtagtaccaggagatatttcttcagctgctttctttattgtagctgctttgatttctccaggaagtgatattacaattcataatgttggcatcaatcctacacgttcaggtattatagatatcgttgaacaaatgaatggtaacattgaattatttaatgttacagagtcttcagaaccaactgcgtcgattagagttcagtatacgaacaacttgaaaccaatcacaattgaaggagatttaattcctaaagcaattgatgaattgccaattattgctttgttatgcactcaagcttctggtacaagtatgattaaggacgcagaggaattaaaggtaaaagaaactaatcgtattgatacaactgcagatatgcttaatttactaggttttaaattacaagctacagaggatggattaattattcatccctctgaattaactagaaatgctatagtagatagcttaactgaccacagaattggcatgatgcttgcagtcgcctctattttaagtgattcgccattaacgatacgtcagtttgatgcagtaaatgtatcattccctggtttcttgccgaaattaaagcttttagaaaatgagggataaaatattatggaagatatctataaattaatagacgatatcaatcttcaaaaattagatcatttagatacacgtgtaaatgaagcattaacatccaataatgatgatgctttatttattttaggagaaacattatataactttggattaacacctcaaggtcttgaagtgtttagaacgttatatcataagtatccagatgaaagtgaactattaatttattttatcgaaggccttatgtctgaaaatcaaacagacgaagcattagaatatttaaatcaagttgaattatcacctgaaaagttaatgttagaagccgacttatatcaacaaatcaatatgactgaagttgctattgataagttaactgaagcgcgtgaattagaacctaatgacccaattattcattttgctttagcagaattactttattttgatggacaataccttcgtgctacacgagaatatgaagttgttttagatacaggcgaatatgaaataaatggaattaatttattttcaagaatggctgattgtgcgttacaaagtggaaattatagtgatgctatacagttatttgatgagattagtgaagatgaaatgatctctgatgactttttcaaaaaagccatcgcatatgaaaaaaatgatctaactcaagaagctataaaaattatgactacacttctttctaaagacccagactttattcaaggttacttttatttacaatctttatatgaaaatgaaaaaaattatccagatgcgattgaaacaggtaaagaagggttacgtcttaatcaattttataaagaactcatggtttctaccggtagtttagaaattgaacatggagatgcgaatgagggggtagaacttcttaaaaaagcacttgaagtagataatggttaccataaacctttacttatcttaagtgatttattccgtcaaaaagaagactatgaagccatcatttcacttctatcttatgtagatgaagaagatcttgaccctgtctttatgtggcatttagcacatgcatatggggaagaagaaagagatactgaagcccaacatttctatgaattggcttatccaacattaaaatctcagagtctattcttaagcgattattatttctatttaattgaaattggccaaaaagataaagctaaagtattacttaacgaattattaattatcgatccaactaatgaaacttggaatgaagaattgagcagattgaatgactagagtgggtgttaaaattgaatgacacattagttaaaatgaaacaaagctatattgaatatgctttgtttcattatcattttaagtccagaattagtgtgtggctattaaattatttaaaagcctcaccgccaaaattaaattgtagtcattttgtaaataagaaaattaaaagtcatataacccttgaaattggcctaaaacactccaatttctctgcgattaaattaacaaaagacgatcaaacattaattaatacaaatgaaatattcaattatatagcttctaaagatatttgtattgatatattcattcactttgaatacaacgataagcaagatgggcgattaaatgagcttataattcaacaattaatatattctgatcaatatcttgcatatcttaataatatatatcacttaagtcttgatctaaataaaaagtattcactaatcgaacaattagaacatcatatcgatgtaagtttacaaatgaaagatcaacaacgtttttatcaattatcacaaattttgagtgtattaactcatcactcatagatcaaaattaaaggaattataacttatgcctactttaagacaactatgggaattatcattatatcaacgttccatactcgtaatattgcttatatgtaatgttttaggcaccatttatggttttatatggtatggtgatcaattacttaagacacaatggcattatctaatttttgtaccagatagtcctattgcatcgctattgttatgtatatcaatttgtttaattattttaaataaacaaaatagtattattgaaggactagcatttgtaacattatttaaatatggtttatgggctgtcattatgaatttgataatgatggttaataataacgatataactattatgaatgtacttttaattattagtcatggaattatggtacttgaaagtatctatttttatccacgattcaaaatttctatactcagtttgtttatttctatgatatggatatttaacaatgattatgtagattatatattaaagaaatatccttattatgattttatacagcaacacgttcatttagttgcttttatcgcgctatggctaagtattatgtcacttatcctttattatagttttaataaattaataaaggttaaattatttgataaaaaattcgatagtcagtagaatatgattaaaggagagtgaaattgattgtctatagtgtcttatattatatatatcgtcattattatgctcattccaatgtgggctcaacacaaagtaaaatcaaattatgaaaaatattcacaggtaagatcaacaagtggtaagacgggtcgtgaagtagcagaagaaattcttcatgctaatggaatttacgatgtagatgtagttaagggcgaaggctttttaacagaccactatgatccaaataagaaagtagtttgtttatctcctgcaaactttgatcgtccttcagtagctggtacagctattgcggcacacgaagttggacacgctattcaacaccaacaaggttatgcgtttttacgttttagaactgctttagtacctttagcaaatattggtagttcattaagctatatcattattatggctggtatctttttaacagcattaggtagtgcttttggctcaactgcattatggattggtgctgggttaatgtcattagcagttttattctcaatcgtgacattaccagttgaatttgatgcaagctcaagagcgatgaaacaaattactgcacttaatattgtgaatgaaaaagaatataaacatgcgagaaaggtattatcagcagcagctatgacttatgtagcagcaacagctacagctgtagccgaacttgttagaattattttactggcacgtgcaagtgataactaaactacctttataaactaacttaatcttaaatcttgtgtaacaacatttaagattttcaaggagttatatcgagcgaaatatgaattcaaaaatgaattctgtttcgctctttttttatatctcatagaatagaattgataaaatgcattaacaactaatttgagatatacttagaaagaaacggaaaaaaggagaatgatgatgaaatctttaaatcaaatgcaaaaagaagtagatgactatattagtcaatttaaagcgggttatttttctccattagctaatttagcccgtctaacagaagaagtgggtgaacttgcaagagaaatcaatcattattacggtgaaaagcaaaagaaaccaacggaagaagaaaactctgttaaagctgaattaggagataatttatttgttttactttgcattgctaattcacttggtattgatatgacagaaagttttaatgatacaatggataaatttaatactagagataaaaatcgatttgaacgtaaataatggatagaaagggggttattttatgaaaataggtattacatgttatccgtcaatgggtggctcaggtatcatagcaactgaattaggtataaaaatggcagaaaggggacatgaagttcactttattacgtcaaatattccttttagaattcgtaagcctttgcctaacattactatccatcaagtcgaagtaaatcaatatgcagtatttcaatatccaccatatgatattacattgagcacaaaaatatctgaagttattaaagaatatgatttagatatcttgcatatgcattatgctgtaccacacgctgtatgtggtattttagcacgtcaaatgtctggaaaagatataaaaattatgacaacattacatggtactgatatcacagtgttaggctatgatcattcacttaaaggcgctattaaatttggcattgaacaaagtgacctcgtgactagtgtcagtcattcattagctaaacaaacacagtcaattattgaaacagataaagagattattcctatttataattttgttcgagaaaaagaatttcctacacaacatgaaaatcaatataaagagctttacgatataaagcctgaggaaaaagttcttatacatgtatcaaactttagaaaagtcaaacgtattgacactattttagaaactttcgctaaagttcataaacatataccaagcaagttgatcttattaggtgatggtccagaacttttagatatgcgtaaaatagcaaggtcattacatatcgaagatgatgtattatttttaggtaaacaagatcaagttagtaaattctatcaaatggctgatttagttttgctgttaagtgaaaaagaaagttttggccttacactattagaggcaatgactacaggagtcgtacctataggttcaaatgctggtggtatcaaagaagtcatcaaacatggtgaaacaggttatattgtagatgtaggagatagtgaacaagcaagtcattatgcactaaaattattaacagatgagcaactttatcaagaattacaaagtaatatgcttaaagatattaaacaacgatttagttctgaacttatcgtcgatcaatatgaatattactataaaaaaatgttgaattaaaaaagaggattaatatgggtaatgaattatttgaaacagctttgccaattctaaatcaaatagaaaaacatcatttcgaagcttattttgtaggcggggcagtcagagattacattatgcatcgtacaattcatgatattgatatcactacaagtgcgatgccagacgaaattgaagatatatttgaacacactattccaattggaaaagagcatggcacaatcaatgttgttttcaacaatgaaaattacgaagtgacaacatttagatcagaaggtgattatttagatcaccgtcgtccaagtgaagttaattttgtgagaaatctctatgaagatgtacaacgtagagatttcactatcaatgctattgctatggataaaaattataaaatatttgattactttggtggtcaaaaggatatacaatcaaaattgatacgtacggtagggaatccaagtgaacgatttaaagaagatgcattaagaattattcgtggccttagatttcagtcacaacttacatttgatattcatactgaaacctttgaagcaatgcaattaacttgttcggacgttaaatatttatcaatcgagcgaattgttgtagaatttaaaaaattaatcttaggaagtaatgttaaacagagttatcataatttattatctttaaaaatttttaattatattccattttttaatgaattagatatgacatgtgtttacatcaatgaacctcttgaatttgaacaatggttagccatcttacttataaaaaataataatcttccttctttaaagcaattaaaaattagtaataaagaaaaatcagatatacatacatatattgctatcattgaaacattacctcaaattactactaaagatgctttgaaattatttgtttatgattatagtgactattatatcttaaaggttttaaatatttattctgtacttcaaaataatcaaattcctaccgcttcagaacttattatcaattctctttctattaaacaagtcgttcaacaccttcaattacatgaacgtaaagaaatggatgtgaatggaaaagatttacttgcacattttaataaaaatggtggcccttggttaaaaaatgtattgagagaaatagaatgtgcgatagttactgataaaatcaaaaataacaaagaagaaattttgaaatgggtgaatgaaaatgtcaaaatatagtcaagatgtcgttaaaatgttatatgagcatcaatcagaatatatttctggtcaatacattgcaaatcagcttaatatatcgagagctgctgtgaaaaaagtaattgatcaattaaaagcagatggatgtgatattgactcaattaatcataaaggacataagcttaatgcatcgccaaatcgttggtatagaggcattatcaataaagtactagagtctaatcatttagtatccaaaattgaagtatatgatagtgttgaatctactcaaactattgctaaacaaggtcttgttgataatcagcataccatgttaattttaagtgatgaacaaacaaaaggtcgtggtcgtttcaatcgtaattggtcttcttcaaaaggaaaagggttatggatgtctgttgttttaagacctaatgtctcatttgcaatgattccaaaatttaatctttttatagctttaggaattagagatgctatccaagcattttctagagacaaagtagagattaaatggccaaatgatatttatattaatgataaaaaagtatgtggatttttaacagaaatggtagcaaatgctgatgcagttgaggccataatatgtggtattggtattaatttaaaccatcaagaagaagatttttctgatatgatacgtcatcgtgctacaagcattcgcttgcaccattcagaagaaatcaatcgatatcaatttttgaaacgtttaattgaggaaattgaaaagcgttaccatcaatttcttaactcttcatttgaaacgattagagatgaatacattcgtacatctaatatttggcatcgtaagttaacatttactgaaaatggagaacaatttataggtgaagctattgatattaataatgacggctttttaattgtcaaagatgaagataatcagactagacgacttataagcgcagatatagatatataagcatacggatagaattaggagagatagatatggcatatacaagttttgcggtagtagatttagaaacaaccggaaaccaacttgaacatgatgaaattatacaaattggtattacatttgtacgtgataataaaatatcaggagcttatcattcaatgattcgtactgatttggaaatcccaccatttatccaagctttgacttctatcgaagaaactatgctagaacaagcaccgtattttcatgaaattgctgatgatatatatgaacaactcaaagattgtatatttgtagcccacaatgttgactttgatttgaatttcattaaaaaagcatttgaaaaaagtaatattcattttaaacctaaaaaggtgcttgataccctagaattatttaaaattgcatttcctactgaaaaaagttaccaattaagtgaattagcaaatgctcataatatacctctgacaaatgcacatcgagcagatgaggatgcaacaacaacggcctatttaatgattaaagcttttaaaaagtttgagtcattacctatagataccttaaaacaattatattatttaagtaagcatttaaaatatgatttatttaacattttatttgaaatggtcagacaacatcataatcatgatatagattatcagtatgctcaatttgaacagattatctataaaaaacaacaagacttaaaagtgccacaaattgaatttaaaggttcattaaaagatttatatctagaagttacaacagcacttgaacttacttatcgcccacaacaactctatttgtcagaaattattttagagcagttaatgcataatgataaggcacttattgaagcacctttaggaagtggtaaatcattagcatacttattagctgcattgatgtataacattgaaacaggcagacatgtaatgatttcaacaaacacgaaattacttcaacatcaattacttcaaaaagatattcctagtattaatcgcgcgctagatttcaaaattaatgctgcacttattaaaagtaaaacagactatatttcactaggattgataagtcaaattttaaaagatgatacagctaactatgaagtgaatattttaaaaatgcaattacttatatggatattagaaacaaatactggagatatacaagagttaaatttaaaaggtggtcagaaaatgtattttgaccaaaaattagaaacttatgttccagtaagacacgatattcattactataattatataaaacgtaatgctcaaaatattcaaattggtattactaatcatgcgcatcttattcattcagatcaagagaattcaatctatcagttatttgatgattgtatcattgatgaagcacatcgtttacctgattatgctcttaatcaagtgaccaatgaattaaactattctgatatcaaatatcagttaggtttaatagggaaaaatgaaaatgaaaagcttcttaaattagtagatcatttagagcaacaacgtattttggaacgattagatattccacctattgacgtgtttggtttaaaatctaatatttctgatttacacgaactaaatgaaaccctatttaatcatattttcgatattgttcaacactcagatgtacatgatgatgatgtacatcgatatcattatgtattcgactttgattctacacgtattctaaaagatttacatacaattgtagacaaaatcaataaaactttagaattttttaatggtattaaccataaaacaatcaaatctatacgtaagcaattactttacattaacgataattacagacatatagaacaaagtttaaaacaaaatcatactgccttcatatctatcaaaaatttgaatcaaaaatcgaccatacgtctaattgtaaaagattatgaagtacgggatattttaacaaagcaagtgctcgagaaatttaaatcattaacatttatttcaggcacacttacatttaaccattcgtttgaggcatttaaaaactggtttaaagaagatgtagaatttaatacttatgaagtacagtcatcatttcaaaaccataaatcaacaaatatttatattccaagtgatgttgtttcttatgattttaaaaatacagaggattatgtagcgtctattgtagactatattcaagagtacgtcactataacacaatctaaatgtctcgtacttttcaccagttatcgaatgatgcatatggtacaagagctattaaatgaattaccgatatttgatgattatgttattttgacccaacaacaaaatcaaaactataaaatcgttcaacaatttaatcactttgataaagctattttgttaggtacatcaacattttttgaaggatttgactatcaatctaacggtattaaatgtgtgatgattgctaaattaccattcatgaataaatataatacaaagcattggttaatggattcagaatttgaatctacatttaaagattatgtcttacctgatgctgtaacgcgtttcagacaaggtctaggtagattgattcgtaacgaagacgataagggactcattgtttcctttgatgatcgtttaacaaatagtaactataagcgttttttcgaacaatcgttagaatcttattctcaaaaaaaaggggatattcaacaatttagtaaattactttaccgcatgcaggcaagtaaactgaaaaacagaaaaaaatagtttattttaaataatgagaacactattcaggtgctagaagttcactttctattttgataaaataaataagtattgtataaaaagaaaataaagtaggagtttgattatgaaaacaacaattaaacaagcaaaacaatacattaatcaagaagtcacaattggcgcttggttaacaaataaacgttcaagcggtaaaatcgcatttttacaattacgtgatggtagtggatttatgcaaggtgttgtcgttaaatcagaagtcgatgaagaaacatttaaacttgctaaagacattacacaagaatcatcactttatgtcacaggtacgattacagaagataatcgttctgatttaggctatgaaatgcaagtaaaatcaattgatgtcattcatgaagctcacgattatccaatcacacctaaaaaccatggtacagaattcttaatggatcatcgtcacttatggttaagatctaaaaagcaacatgcagtaatgaaaattagaaatgaaatcattagagcaacatatgaattttttaatgaaaatggctttactaaaattgatccgcctatcttaactgcaagtgcaccagaaggtactagtgaattattccatactaaatactttgatcaagatgcatttttatctcaaagtggtcaattatatatggaagctgcagctatggcacatggacgtgtcttctcatttggaccaacatttagagctgaaaaatctaaaacaagacgtcatttaattgagttctggatgattgaacctgaaatggcattcacaaatcacgaagaaagtttacaagttcaagaacaatatgtatctcatatcgtaaaatctgtattagaacattgtaaattagaattaaaagcgctagatagagatacgagtaaattagaaaaagtatctgcgccattcccacgcatctcttatgatgatgctatcaagttcttaaaagaagaaggatttgatgacattgaatggggtgaagactttggtgcgccacatgaaacagctatagccaatcattatgatttaccagtatttattacaaattatccaactaaaattaaaccattctatatgcagccaaaccctaacaacgaagacacagttttatgtgcagatttaattgcaccagaaggttatggtgaaattattggtggttctgaacgtattaatgatttagaattattagaacaacgtatcgatgaacatcaacttgatacagaaagttataactactatttagacttacgtcgttatggtagtgtgccacacagtggttttggtttaggtttagaacgcacagttgcatggatttcaggcgttgaacacgtgagagaaacatcaccattcccacgtttattaaatcgtttatatccataaaatatcacgttttataaatcatacatggggagtgagactaaatgatgttattcatgtctcactcccactttttaaaataagaaagagaggggtatcatggacacacatcaacttaaaactcgtcctgttgtagttagaagggaacttttcgatcattacaatgaattaggtttaaatgaaaaagatttagtcattttgattaagttgatttatgccgctgaagtttctaataaacaaccctcaatagaatttttgcaaaaaggttcaaatatggagccgagagaaataacatcaattattcaaaatttaattcagcgtgatttacttgcactacatgtaagtaaagatgaggaaggaaaatttactgaatatatgaatttaaatcgtttttacgaaaagttaagtgatattttaactcaagaaaaaaatgaaactacacatcatcaaacgcaacaaaactttaaggaattatttcaatatattgaacagttgttttcgagaccattatcaccatatgaaatcgaaacgctcaaccaatggattgatgtagaccaacatgattacactttaatacgtgctgcattagatgaagcatatagtcatgataaattaagttttaaatatgttgatcgtatcttattaaattggaagaaaaacaatgtaacaactttagaagaatctaacaaagtgagagaaaaattcaataaacctaaattaactcatactgtaaaacatatacctaaatttgactggttaaatggagagaatctagatggtaagtaagaaaaaagcattagaaatgattgacgttattgcagatatgtttcctgatgcagaatgtgaattaaaacatgataatccctttgaattaacaatagctgtattattatctgcgcaatgtacagataatttagttaataaagtgacacgttcactttttaaaaaatataaaactcctgaagattatttaaaagtagatatagaagaattgcagaatgatataaaatcaataggtttatatcgtaataaagcaaaaaatattaaaaaattatgccaatctttactcgaccagtacggtggacaagttcctcatacacataaagatttagaaagcttagctggagtcggacgaaaaacagcgaacgttgtcatgagtgtagcttttgatgagccttctttggcagtagacacacacgttgaacgtgtttcaaagcgtctaggtattaataagtggaaagataatgttaaacaagtagaagaacgtttgtgtgatattattccaaaagaaagatggagtaaaagtcatcatcaacttatcttttttggacgttatcattgtattgctcgaaaaccaaaatgtgatatttgtccattacttgaggattgtagagaagggcaaaaacgcatgaaagtaatgaaaaaggaagtcggaacaaatgattaataaatcacaatttaaatcgctagaaaatgaacttgatgtctatgctaagaaaagacaactaaattctgatttagcaaaacaatatatcgatgattattttgaactgcttcttttgttctttaaacaaattaatgaaatagagtctattgatttaaatcatttagaccaatatccagttgttcctatgaattttttagaacgatatcaatatatgttaaaaagaaaataccactttatggggtatagtcaaatgaaaacattaaaaaatgagcttattaaaatgaacgcttcatatcaaattagaagaaaaaatcaaaataataattaatatgaaagatagtctagagcaaagttgttctagactttttttaattaaaaaaacgacatagccttataaaagactatgtcgtttttaaagctattacgacgcttttctaaaattaaaaatcgtgtttgctttaaatatgttagataaactactattgttatttgtattatcattattattattttgttgagttgatgtggtactattgttagcactgttgttcgtagttgaattatttgctgagttatcagttgtattaccagtattcgttgtagtattaccgttcgttgttgatgtagtatttgagttgttatcactggtagaagtagaattgcttgaactactttctgtactactagaattacttgaatcatttgatgagctactatctgaactactagtagacttgttatcatatttacttcctgatgttgtattattatctggatgatctttaacagatagtgtacttgcacttgaaccagtaactgaatcaggttttttgaagtcaccatcattacttgaagtaatatctgacatcacatctttatatagatattgtgcatattcttgttcagaatgtcctaagaatgaatcttcaccgcctggtttaatttggctgaagcccatccaaattgacattgtatatttaggtgtgaaaccattcatccaaatatctttagctgcattgtcaggtaagttatattgattattaacttctgtgccataagtacttgtacctgttttagcacccatattaacgccagcaacaccatgaccgtaagcagaaccatatggtttaaatgtaccagttaacatttctgcaagcatgtaagcagtataatcttccatcgctttatgacttgtatgatcaaattcgatagtttcatcatcagatgttacaactttgcgaattgaatgtgcattattgtaagtaccaccattagctattgatgcgaatgctgatgctaattgagtaggtgagaattcagaagcaccgccacctaaaatttcagatggccctaaatcaatttcataatctaaaccaactttagacgcaaaatcttttggagcatctttacctgcatttgatgatacttgttgccaagcttttaaagcaggaatattaaaactttgtcttaatgcatcgtatgcagatactgtaccatgaccttgcccatcatagttacggaatgtaccaccatcaatggaataacttgattcatcttgcattgcgtggtttgtagcccattgcatattttcaattgctggaccgtatgataagaatggtttcagtgatgaaccagtcaagtgtgtatctgtagcagcgttacgatcaacgacatctctataatttcgtccaccagaaatggctacaatgcctcctgttttactatcaagaatggttgaacccacttgttgatcatcatttttatagtaatcaccattatcaatgcgatcttgaagcgttttttgaacgtttttatccatatttgtataaatcttaataccactttgcattaaatcactatagtttttatttttaaagtgtttattgcctattaattcagctttaacaaaattaacgtaagaatcatactcactattagaatcatcattagatatttgacgttcttttgttgtacgttttactaaattgtcttctaatgaagtagctttagcttctttccactgtttatcagagattctatgatggtagtgcattaagtataaaacagtttctttacgattttcagcttctttcgggttatcataaatgttatacaggttaggaacttgtggtaaaccagctagataggcttcttcagctaaattaagttcatttaaatttttattaaagtaatatttagctgcagctctaacgccatatacaccgtctgagtaataaattttatttaagtacatttggaaaatatcatctttactgtactcttgctctaaacggtaagatagataagcttcttgcgctttacgtccaatagatttcttttctgaaaggaacgaacgcttaactacttgttgtgttagagtagatgccccttgggaaccaaaaccgccagtcaagttcttaccaatagcaccaaataaacgtttatagtctaaagcaccatgttcatagaaacgattatcctcagttgctaacacggcatttttcatattttttggaacatctttcaaatcaacatgttctctacgtgcaccattgtctaatttcttaaccaagtcaccgtttttatcataaatttcagcaggctttggatcctgtaatttagactcattaaatgctggagctttccaagcatagtatgcaaatagaagtataccgagtagaagtaacacgataaaggcaatgaataaaaagcctataatcttaataatcgttctttttacattcttcttcttttttgatttggatttcccatttttgcctttatttggttgggaagatcctttattttccgtcatacgcggtcctcactttcatctaatatcaacttatcaacagccttgagataattcaatctaggttgatactgataaggaatatagtaactattttttttgatttcttcaactgttattgatttttttatttcctttttatatctttcccaaaaaggttcaaacttcgaaaaaggtagtagatatacctcatcaagcactttaaatctaatcagtaaaaagacgagtcctttttgcataaaacaacttttcatatgttctacttgatgatcatggatattatttaaagggaaagacgttttatttttcgtttctttcgcttcaaaatcaatataatagcctcgatagacgccattataatcagttgtagaaggcgtacgaaagtatgcttcattaattacagctttacttcttttaggataatgaacatttactatttgaataggagtaggtttcttatgtataacagccacaccatgcttaaaataataattgttagattgttcaatatctttttcgagagtcatacctcgtccaccatatttaatgttactagaagcttcactttgattacttccaaccttagtaggatttagtttaaatggttttccatttggataatttatcatactcaccacacaaatttaatattacactttcaatgtctaagagaataatattaaactataatacgataataatgaaatgagcataatatttatattatactacacataattaaatttattcattaattatctattctattttaacgtgctttaacagtgaaaacaatatgtttaaaaatttgtaataatgtaaaatttatatctaaacaatactctataataattgtaagaaattgtaagaatataggaggcatcgttatgtacacattaattaatgaaatacttaaagaattacagtacatggcgtcaagctataatgaaataaaattgacgcagtcagagaagccatttcatcgagatgttgttccttatgtaaaaaaaattgatgatttaactgaagaattatctcattatcatgatgaactaattcaatttccttatatgaataaggaaaaattagaaattttagttaaacatattaaggaattatctgtagagtgtcactacaataaaacaagtaagaagttatttaatgaaaaattgaagtccgttaattatgatcttaccaatttgtttaaatatatcaaagataaagaggaatcaatgcattgaaaacagtatatgtgactggatataaatcatttgaattaaatatatttaaagatgatatgaaagaagtggattatcttaaacaatttatagaacataaattattacagtatattgacgaagggctagaatgggtacttattcaaggacaaattggtattgaattatgggcagctgaagtagtattaaaattgcaagacacacatcctgagttaaaattaggtattatcacaccattttatggtcatacctccaagtggaatgaacacaatatagcaaagtatgaatctattgctagtaatgcacaatttctagatagtgtatttcattctgaatatcaaggaccttttcaatttaaacaaacagatcaattcatattagatcatacagatatgacgttattaatttatgatgatgaacaagaaggaagtccaaaatattttaagaggatgttagttgattttatggaaaaaacgacttataattgtgatattgtgacatttgatgaacttactgactttattaacgatttacaatggcaacaagaccaaagttttgaatgaggtggaaattaatggcagatgtttctttaaagctttcagcaaaagatatctatgaaaaagactttgaaaaaacgatggctcgcggctatcgtcgtgaagaagtcgatgcttttttagatgatatcattactgattatcagaaaatggctgatatgaataatgaagtagtcagactatctgaagaaaataataaacttaaaaaagaagttgaagaattgagaatcagagttgcaacttcacgtccttctgataataagtcatttgcttcaagtaattcgaaatcagcgaataataacgtagatattttaaaaagaatttctaatcttgaaaaagctgtttttggtaaataatacattggtatcttaaagatataagcttgttacgaagcatgtttgattgctattatgttggattttgatagctaattatttatctatttaaaattctattaaatattttaaaattatgttatactcacacaagtgatattttgggtaatcgctatagaaatatagaggaaagtccatgctcacacaatctgagatgattgtagtgttcgtgcttgatgaaacaataagtcaaggcattaatttgacggcaatgaaataacctaagtcattaattgatacggttaaaatagtttgaaagtgccacagtgacgtagcttttatagaaatataaaaggtggaacgcggtaaacccctcgagtgagcaatccaaatttggtaggagcacttgtttagcggaattcaacgtataaacgagacatctttactcgcatagtaaagatttgtagacagatggttaccaccaaagtaccagtacaactagtgtacgttatgagtacaatggtacagaacatggcttatagagatatcacggactagtttagctctccctttttatggagagctttttttatattgtatacataattattttaatatttgttaatatactaatatgatatgagacaaaggagatgaaataatgtatcaattattagcagtgtgtccaatgggtcttgaagccgtagttgctaaagaaatacaagaacttggttatgatactcaagttgaaaatggacgtattttctttgaaggtgatgctaatgccattgtaaaatgtaatttatggctacgtacagctgatcgattaaaaatagtagtaggtcgcttcaatgctaaaacattcgatgaactttttgaaaagacaaaagcattaccttgggaaacaattatcgataaagaggggcaatttcctgtccaaggtcgtagtgtaaaatctacacttcatagcgttcctgattgtcaagccattactaaaaaagctatcgttgaacgtcttaaaaaagcttataatgaaaaaggatggttaaatgaaagtggtgcgaaatatcctgttgaagtagccattcttaaagataatgtcctacttaccattgatacgtcaggttcagggctaaatcgtagagggtaccgtattgcacaaggtgaagcacctattaaagaaacattagcagctagcttagtacgtttagccaattggaaaggtgatacaccctttattgatccattctgtggttctggaacaattgctattgaagcatgtttaattgctcaaaatattgcgccaggttttaatagagaatttgtatcagaggaatggaatatcatgcctcctaatatttatgacgtcatgcgtgatgaagctgatcaacaagctgactatgataaagatattcaagtgtatgcgtctgatatagatccagaaatggttgaaattgctaaacgtaatgctgaagaagtaggcctaagtgatattattcaatttagtgttaaggatgttaatacattaactatcgatcaagaagggcctgtagcgttagttggtaacccaccatacggcgaacgtattggagatagagatgaagtagaagaaatgtatcgatatgtaggtaaactaatgaaacaatacccgtatttatcaacatatatccttacaagtaataaagaatttgagtatttagttgatcgtaaagcaacaaaacgtcgaaaactttttaatggttatatcgaatgcacgtattatcaatactggggaaaaaagcctaatattgataaataaattgatttgaagatttatttgaaaataattaattttgtaaatttttcttaataaattagataatatttatttaaaatttatgtatttattagcactataatagtgactattgtaaagttattagtaagcgtgttaaaaacacagcacatttaaacagtatagtaaggagagtaagttatgcaaacagttctaattgtaggggctaacggaaaagtatcaattgaagcaactaaaattttcttagagaattctagttttaatgttgatttatttttaagaaatgcccatcgtattcctgattacgcatctaatcgtatcactgtctttgaaggtgatgctaaaaatgttgaagatttagaaaaagcattagatcaagtagatattgtttttgcaagtttatcaggatccctagatagagaagcacaagccattatagatgccatgaacaaaaagaatgttaaacgtttaatatttgtggcggctcctggtatttatgacgaattaccagataaattcaatacatttaataaagaacaatttggtgaaaaattaactaaatatcgtaaagcagctgatttaattgaagcttctgacttagattatacaattattcgtcctgcttggttaacatttaaaaatgaatcagattatgaaattactcaaaaaggtgatacctttaaaggaacagaagtttctagaagaagtgtagccaatttagcagtacgtatagcgaaacaacctgaactttattctagacaaaatattggagtaaataaaccaaatactgatggcgataaaccagcttggtttaactaattcattctatataggtttttattatttcttatgataaaatttaataaacacagctaaagataatttagttttatcaccctaaaagtaaggttataattctttttagttttataaccttaatttttttatattttagagtgagcgaaataaaggggatagcattatgcaaaataatgaacaattagatgtattatacaaactaaaaaaagaaatagaaaaatcgaataacgaagcattagtacatacaataaatcaagtgattaaaaaagtatatttaaatcaatatactttatcatttgttggacatttttcagctggtaaatcaacattaatcaatttattattagaacaagatatattgcctagttcacctgtaccaacgacgagtaatacggctatagtttctgtttcaaaagaagaagagattattgctaatttagaatatcaaaattatgttaagctaaaaacgtatgaagatgtaaaaataatgaaccgattaaatatggatgtggaatctattgaaataaagttcccttcaaataagtttaatcttggttttacattacaagacactccaggagtagattcaaatgtttctgcacaccaatccactactgaacaatttttatatacaagcaatatgattgtgtatacagttgattataatcatgttcagtctgcactcaatttccaatttatgaaacgcatgaatcaagtaggcatacctattatttttgttatcaatcaaattgataagcataatgagaatgaaatttcttttgatacatttaaacaaaaagtagaacaatctatacaagattgggatattaaagtcgatcaactattttatgttagtaaatttgatcatccaaacaatcaacttcatttattctcagagtttttagaagaaaaagataaactacgtgaacctattgaagattttgtaacacgtatcattgaatttatacatcgtactcagcttttatatattcaagagcatatgcaaaatatacttgacgacttaaatatcaatgaatccgaatttgaagaatcctataaacaatttcaacagaatcaagctataagtgaagaagcacaattattaaatcattcttctcaattattaatgtacttaaaagaaaaacggaaaaatatattagataatgcttatattatgactcatgatatgcgagaagatattcgttattatcttgaaagcatggctttagacttcaaagtgggtggtcttctaaataaaaaaaagaaaacagaagaagagagagcaaaacgtttacaaaatgttgtagaccgtttacaagaaaaagtgaatcgacacattcgtcaacccatgcgtgaagatttatcttttataactcgctttatccatcattctgaagtgaatcaacgaattttaaatcaacattatcaaattgaacctactttaatttctaatttatatcaagtacaaacaagcattaataatacctatgtgctcacatttagtgatgacgttgtaaaagcaattgcacgcgttgtcgaaaaacaatcagattcattatttaaagatattattgaacatactgaagcaacggaattatctaacatagataataatgatgcacatttatatgaacagtatcttgagttcaagaatttaaaacagtcattaacaactgaaaattataaacattattatattcatatgaatgactcactcgataaattaattgatcgaacagaaatacattatgaacttaatcaatcaaccatatcttcaacaaatgatttagacgaagatattacatcaactaaggctacgagaactcatcactttgatattcagaaagcactggctatcattgagcctgttcctttattcaataaaacaaagcaagacatcaaagaaacattgcaacgtatagataataaaattgtaaaaataggtgtcttcggtacatttagtgcaggaaaaagtagcttgattaatggtttacttggagatcattatcttgtaagctcacctaatccaacaacggcagctacaactgaaatctcatatggtcatgatagtcaaattactttgaaaacaaatacgcaattgttaaatgaattaaatcaattgcttgaatatcaaaacgtttcttttaactctttagaagaatttatgaatagtaatattgagtctttaaaacaacaattagaaaaaaatcaattggcttttataacatcagtagagaagcacttttcaatgtaccaagatatgctaaaagaaggtataacacatactatttcacaacatgaaattaagcaatggagtgctgaagacgaatacgctacatttgttaaaaccgttcatatacaccttccactggattggttaaaagacaaaattatcgttgattcattagggttacattctaataatcaacgacatacaaatgaaactgaacaaatcttaacttcttcagacctaattttatatgtgagctattttaatcactcatttactgataatgacaaagcatttattgaacatatgaaagatattaaccaattaaatgaagcacagacatttaaaatgattattaatgcggtagatttagctgaaactaatgaagatttaatagcagtggagcagtatgtaaaagatgctctatctcaaatgaatctgccatctgaattattcggtgtatcaagtaaacgtgcattggagactaaagatgaaggcattcttaaattaaaagaaagtattaatcattttgtcgaaactgaatcgaaaacgattttagagaagcaaatggttcatcaaatcgagcaaatgcgcgataactttaatcaaatcatctatgaatttaaaacaaatcaaacacgtatgttagaacgacaacaacaacttgaaacttataaagataaaacaccattaactaaccaaatgattcatacaagtgagcaacatactaaaaatgaggttgaagaacaaatctatcatttaaataaacgattacagcttcaattattagatgaggttaaaaaagtatataatagtcaaatgacacaaaataatgattttaatgatgaaaagaaacatgctacgaaaatgtacttagatcaagttcatcaacgattatatttagaacaaactttattagtcgaaagaataaaaacatactttacttctcaattagatcaacaagtagcaccaacaattcaaaaattaaactcagttcatgtacttatccaacctcattttaaaataacagcgccgtttactgatgatgcactattacgtattagtttagaagagatgctttcagttttacctaaacagttgtctaaacgtaaaattttaaatgcaaatgcgcaaagagaactacaagaaatgatttgttcaaatacactagaactactacaaccatcactaaacgcattaaaacaacaattagattattatgtttctaacttaactcacgacgcgaacatcgaacttaatcagttaaataataatgttttagaacaaatcaatgacttattatctaaacgtatcgatgattcactcattaaacaattagaaacagtaaatcaacaattggacccacttttaaattagaaagaaggattaatatatgactcaacgtgtcttacttgtagatggaatggcgctcttatttagacatttttatgctacaagtctacacaaacaatttatgtataattctaaaggcattccaaccaatgggattcagggttttgttagacatatttttacggcaattaaggatattaaaccaagtcatgtcgcgatatgttgggatatggggcaagcgacctttagaaatgatatgtatacttcttataaacaaaatagacctgcaccaccagatgaattgatacctcaattcgattacgtaaaagacatttcagaacaatttggttttgtgaatatcggtgttgcaaattatgaggcagacgatgtcataggaacactcgctaaaatatattcaaaagataatgaagtacatattgtaactggagatagagatattttacaatgtatcaatgaacaagtagaagtctggttaatcagaaaaggttttaatatttatcatcattatactcttaatcgttttaatgaagagtatgcattacatccacttcaacttattgatattaaagcatttatgggagattcagcagatgggtatcctggtgttaaaggtattggagaaaaaaccgccattaaattaatacaatcttatggtagcgttgaaaacgtactagacaatatcgaatcacttacacctaatcaacagaaaaaaattgcaattgataaagaaaatttgattctatccaaacaattagcgaaaatctatacagatgtgcctattgatacaactgcattatatgaagaaatgaagtatacacattcattgaatcatattctttcaatttgtaatgaacacgaactttatgtctctggtaaatatcttgcttcaaaaattttaatgtaaaacagataaaaaaagaagataaaagaattcaacataaattcttttatcttcttttttacattattattgtttattcttaattaatttgtatagagcttgttgtgctaattgatttgcttctttatttttatctcttggaacccattttacaaatagcaaatcaaaacttgcttctaaaatctccatattttcaaaaaatggtttgaaacgcgcattttttacataaccttgattcacgctatcttctatcaatttagaatctgtgtgcaataaagcatttgaaacatttaattcacgagcatgctctaatgcatgaatgaatgcagaccattcagcactatggttgtccaattctcctaaatcatgtgtataagtatatttaatatcattttctttaattactatcccacacgtactacgtcccggattgccactcgtcgcagcatcaaaaaatattttagccattaaaaacacctctagtttaagcattaattaaacactatttgtctatttaaaaatagcatattgcttagtaaacctaaacaatatgcatgtatgattgttttaataaccttcgtctaatttttgaatttttccatttcgatagaatgacttcgcaatataaccaaatggaacattgaaaatcgttgagactaattttaaaacatacgtagtaataaagatttcaaatacaacacttgcaggcaatgtaccgataaatgcgatagttacaaataatgcagtatcaataattgaacttaataccgtacttccataagctctaataataaatgttttatctgattgaaaaactttttttatcattgaaaagatgaacacatctacatgttgccctataatataagcaataattgaacctaaagcaattctcggcactaaatcaaaaatcgtagataatgctttttgagatatatcttctggtgcgggtataaaatgtaatgacatttgcattacaattatcataacaagagttgatgagaagcctaaccatacagcacgtttagcaacttttcgtccataaatatcatttaaaatatctgtagctaggtagatagaggcaaacattacattacctagagttgctgagataccaaaaatatcaaccgttttgatgacttggatattagcaataattgtaccgatagctacccaagcgataagaccttgtttaccaaaacaacgatacattaaaaccattacaataaatgttacaaaaaaagtagcaatgccaaaaaattcattatacatcatttatcctcctaaattttgataatgcgggtgtttagaaaccgctaagcaactttaatattttatagtaaaagtaattcaaattcaatactcattaatcaattcatattataaatattaaaaaataaaatcgattattttaaaatgatcatcatataagttataataactccatatttataaaattaagtataaggagtgaaagttatacttacacattccgaacaaaatgcaatagaaaaaattgatgaattaatgaatacttattgtgataaatgtttactgaaaacacacattagaaaaacagaaggaaaaacacaagcacatcatttttgtatttctgaatgttcaataggtaagcaaattaagcaattaggcaatgaacttcaataggagggaattttatgcatataaagtcaattgaagacacaccaaattataatacgattaaaattaatttaagtgaaaaacgtaaagataatcaattaaatacgtatacatctgctcaagatgggcaacctgattttattaatcgattatttgatatcgaaggagtaaagtcagttttttatgtcatggattttatttcagtagataaagaggaatatgccaattgggatgatcttgtacctaaaattgaagacacattttaattttaggaggaacagtagtggaaatattaaaaattgaaccaacaccaagcccaaatacaatgaaaatcgttttaagtgaaaagcgtgctgataatcagtcgaacacatatacagaagtcaaaacatctcaacctgattttattaatgacttattacaaattaaagatgttaaatctatatttcatgtaattgactttttagctattgataagtatccgaaagcaaattgggaagaggtattacctcaaattactgcgtcacttcaaaaagaggaaacgattagtcaatcatctcagtttgatgaacactatggagaagtgaaagcagagatactcacttttaaaaatatcccatatcaaattaaattaacaaatgctcatgaagaaatacgtaaacaactacctgatatctttatcaatagtatgcttaaagcacaagaagatgatgataatgttatttttcttagaaaatggaaagaggttggtttacgttatggagaactttctttagttatggaagaagtttatgaagaaatcattgcattgtatccaaaaagtcgattggaacaattagtcgttcaagctttatctaagcaaacgaaaagtatatctcatttttatcaacatgtttcatacgaggagtacttgaatgaatcagactggaaagtacgtctcagaatgttaacagaatttccaacaccaacacttgaggatattccactcttagagcaagccttaaatgaaaataagttaccattaagacgtcaagcgattgttttatttggtatgattgaaagtaaagaaatattgccatatttgtataaaggattaaatgataagcatcctgctattcgacgtacagctggagactgtatcagtgatttaggttataaagaagctttgccagaaatggaaaaagcacttaatgatccacaaaaaattgttcgttggagagctgcaatgtttttatttgaagaaggtggcaaagcgcaactcgcatctctaagagcgcatgcgaacgacaatgcttacgaagtaaaacttcaagtggaaatggcaatttctagaattgaaaatggcgatgaagcattaggttccgtatggaaacaaattgctaatcgtaataaacattaaaggagttttttatatgaatccgtatgaacaatatatgcatgaactagcacaacaaatgcgttctgaattaactgataatggttttacaagtttagaatcaagtgaagatgtatcaaactatatgaacaatgttaaagatgacgaaacaacatttgttgttattaattctacatgtggttgtgctgctggtctagcgagacctgccgctgtagcagttgctgatcaaaatgataaaaagccaacacataaagtcacagtgtttgctggacaagataaaaaagcaacgcaaacaatgcgcgattatatccaacaagtaccttcaagcccttcgtatgctttatttaaaggtacagaattaaaacattttattccgcgtgaacatattgaaggtagagatattcaagatatttgtatggatattaaagatgctttcgacgaaaattgttaatattattagactaatttactctatcttaatatgcatctccaataatataattcattcaatatctttctattttctagtataatgataattaatataaaatttaggagagatgtacatatgctcaatccttttgattcggcttatcacgatttatgtaatgacattttagaaattggtaatcaacgtgatgatagaacacatacaggtaccatttctaaatttggacatcaaatccgcttcgatttaacgaagggattccctttactcactacaaaaaaagtatctttcaaacttattgctactgagttattgtggtttataaaaggagatactaatattaagtatttattaaaatataataataatatttggaatgaatgggcttttgaaaaatatattcaatctgaagattatcatggtccagatatgacaaattttggacatcgttctcaaaaagatgaaaatttcaataaaatgtaccaacaggaaatgaaaaaatttaaagagaaagtgttaaatgatgatacttttgctaaaaaatatggtgatttaggacatgtctatggaaaacaatggcgtgattgggtagatcaatatggtaatcatttcgatcagcttaaaacagttattcaacaaattaagacaaatcctaattcgagaagacacattgtttcagcatggaatccgactgaaattgatagtatggcattaccaccatgtcatacaatgtttcagttctatgtacaagatggcaaattaagttgtcaactttatcaacgtagtgcagatattttcctaggtgtgccttttaatattgcaagttatgcattacttacgcatttaattgctaaagaatgtaatttagaagttggagaattcattcatacttttggagatgcacatatttattctaatcatatagaggcaatcaagactcaactttctagagaaagttttgcacctcctacattaaaaataaactctgaacaatcaatctttgatattaattatgaagatttagaacttgtagattatcaatctcatccagcaattaaagcgcccattgctgtgtaatctatctttaattaaaaataaactaaaaggggatatgataaatgacattgtcaattttagtggcacatgatcaacaacgtgtcattggttataaaaatgctctaccatggcatattccaaatgatttaaaacatgtaaaacaactctcaactggccatacacttgtaatgggtagaaaaacatttgaatctattggcaaaccattaccaaatagaaaaaatgtagttttaactcgtgataacaattttaaacctgacggcgttgaagtgattcacacaatagatgatatctacaacttagagggtcatgtttttattttcggtggccaaacattatttgaagtaatgattgataaagttgacgatatgtatatcactgtagtagacggaaaacatcaaggtgatacatttttccctccctacacatttgaagattggacggttgcatcttctgaagagggtcaacttgatgaaaaaaatactattccacatacctttttacatttagtacgaaaataaaataaactaagaggagaaattatgactaaacaagtaatcgttacagactctacctcagatttatcagctgaatatttaaatcaacataacatacatgtcgttccattaaatttaactattgataaagaatcatttgtagatcaagtagatatctcatctgaggagtacattaaacgtattgaagaaaacgctgacgtcaaaacgagtcagccatcaattggtaaatttattgaattatatgaacaacttgataatgacaatgacgatgtagaaatctttagtattcatatgtcttcaggattaagtggaacatatcagactgctttacaagcgagcaatatggttgaagcaaaagtaaatgtgattgattcaaaatcaatttcatttggattagcataccaaattcaacgtttagtagaacttgtaaatactaatctttcaagtatagaaattattaaacatatttcagacttgcagaaaaatattaaactatttgttgttattggccaactcaatcaattaattaaaggtggacgcatcagtaaaacaaaaggtttaatcggaaatataatgaaaataaaaccgataggaacacttagagagggatatttagaaatcgtacataattctcgtactcaaaattctagtattcaatatctaaaaaaagaaattgctaaatttattgaaaatcatactattcaatcgattggtattgcacatgcaaatacgattgaatttgttgaaaaagtaaaaaatcaatttaatgaagcatttggacaacaaagctatgatgttaatgtaacgacaccagtcatttctacacacactggtcaagacgctatcggtcttgtcgtagttagaggataatagataaataataggtcacttaagttattgatttctgagttaattactttaatttaatatcattatatcgtaaatttaaagaaagatagaggaggtaatataatggcatatgcaacattagcaggaggatgtttctggtgtatggttaaaccctttacatcttacccaggtattgaagatgtcgtatcaggttatagcggcggagatatagaaaatccaacgtatgaacaagtatgttcaaatcaaacgggtcatagagaagcagttcaaattacttataatccagatattacgtcatttgaaaatattttagatgtttactttaaaatatttgacccgacagataataaagggcaattttttgatagaggcgaaagctatgaaccagcaatattttatcacgatgaacaacaaaaaaaggctgccgaattaaaaatccaacaactaaatgaagaaggtatttttaaaaaaccaatcatcacaccagttcttccttacaaaaacttttatccagcagaagattaccatcaagactattataaaaaaaatcctatgcattatgagcaatatcaacgcggttctggtagaaaagcatttatagaatcacattgggggtctcaaaatgattaaaaaagataaaagcgaattaaatgatatggagtatcttgttactcaagaaaatggtacagaacctccttttcaaaatgaatattggaatcattttgataaaggaatatacgtagataaaatttctggtaagcctttatttacttctgaagagaaatttgaatctgattgtggttggccgagtttctcaaaagcattagatgatgatgaaattgttgaactcgtagataaatcatttggtatgattcgaactgaagttagatcagaagatgctaacagtcatttaggtcacgtattcaatgatggcccaaaagaaagtggcggattgcgttattgtattaattctgcagccattcaatttattccatacgaaaaattagaagaattaggatatggcgatttgattcaacattttaataaataggagcgatgaataatgtttaaaaaattatttggtaaagataaagaagtcaataaagaaactcaactatatgcaccattaacaggtgaatatgtcaaaattgaagatataccagatcctgtatttgcccaaaaaatgatgggtgaaggtttcggtattaatcctactgaaggtgaagtagtttccccagttgctggaaaagttgataatgtttttccaacaaaacatgcaattggtttaaaaactaaaaatggtcttgaaattttagtacacattggtttagatacggtgcagttagacggtgaaggatttaatgtacttgttagcagtggtgatacagtacaagtaggcgaccctctactcaaattcgatttagaatttattagaaataatgccaaatcagttatttcacctattattattacaaattctgatcaaacagaatctatttcactcgatgatgttaaagctgttattaaaggtgaaactaaagttgtcgatgtgacaatgagctaatgaaagatcattcattttatcaatttgccttaacggttagaggacgtaaagatgataaaggtgaattagccgaagacattttcaatgacttatcgtttccaaaacatgaaagtgacttcaacatattatcagactatatcgaaatgcaaagtgacattacgttacctatgtccgtatttgatgatttatatgaagaatatacagaatggttaaaattctaatttaaattcgttttatgtctaaatatgatatggagtggcatataaatcttaattttagatttatatgccactctttttatttttatctaattaagaaatacaatttcttataatttgcgtttgctcaaaaataaagacatactaggtatgtctttataaaaaatgataagagacaagatgtaattagaggaagtgattttatgaataatcattctgaggagcaccatgacggacaatcagatgaaaaaagatatgcatctactaaaaaaaagatgcatttgacaatatggcagtttatcttaattttattaagtgttattatcattacaacgattatagctgtatttgcgacgataggaatcaatcataaattaagtggtttaactaaagaagaacgtcaagaaatgaaaaaaatagaatttgcatataaaacgttagatacagattattacaaaaaacaaaactcaagtaaactttctgaagctgcgattaatggtatggtaaaagaattaaaagatccatattctgaatacatgacaaagtctgaaacaaagagctttaatgaagatgtatctggagattttgtaggtattggtgcagaaatgcaaaagaaaaataaagatattatgattacaagtcccatgaaagattctcctgctgaaaaagctggccttcaacctaaagatattgtcacaaaagttaatggcaagtcagtggtaggtaaacctttagatcaagttgttaaagtggtaagaggtaaagaaggctcaaatgttaagttaactattaaacgcggttctgaagaaaaagatattaacattaaacgtggtaaaattcatgttaaaagtgtggaatataagaaaaaaggtaacataggtgtatttacgattactaaattccaacagaatactgcgggtgaattaaaatctgcaattataaaagctcataatgctggtgttcgaaatatcatcttagacttgcgtaataatccaggtggattattagatgaggcagttaaaatggctaatatttttattgataaaggtcagactgttgttcaacttgaaaaaggcaatgataaagaagcaattaaaacttctaatgatgctttaaaagatgttaaagatatgaaagtgagtattttagtaaatgaaggttccgcaagtgcgtcagaggtctttacaggagcaatgaaagatcatcataaagctaaagtgtatggctcaaaaacatttggtaaaggaatcgttcaaaccacacgagaacttaaagatggctcattattaaaatatacacaaatgaaatggttaacacctgatgatcattatattcatggaaaaggtattagaccagatgttacaattgattctcctaagtatcaatcattaagtgttattccgtctgataaaacatattctgttggcgataataataaaaatgttaaatcaataaaaattggtttagatgctttaggttattataacggagatgaatcaaaccaatttgataatcaattagctaatactattaaactattccaatcaaataatcaactatctgaaacgggaaaatttgataccaaaacaaatgaaaaattcactcaattattagttgaaaaatcaaataatgaagacacggtcttagataaattattaaaattaataaaatagaaaggaatatctattatatgattagactaggtaaacatgaagatattaatcaaatcgaaatattagtgtcagaagcaaaagatttaatgaaatcatttgggaataatcagtgggacgataagtacccaactcctgaacattttaaggcagatattgatactaagacgttgtatgttttagaagaaaataacactatttatggatttattgttgtcgaccaacaacaatcagagtggtatgataatttagaatggccaattgatagaaataacgcttatgttattcatagattagttggttctaaagattataaaggtgcagcaactcaattatttgattttgcagttaaattagcagaagaacatcatatccatgtgattctgacagatacttttgcattaaataaacctgctcaaggtttattcgagaaatttggtttccaaaaagtaggagaaacagaaattgactatcatccattcaatagaggcgcaccattctatgcatattataaaaacatataagaatagaggttaataatcatgtctaaaattgcgtttaccggaggcggcacagtaggccatgtgtctgtgaacttaagtttaattccaactgcattagaaaaaggacatcaagttttttatattggctctaaaaacggaattgaacgagaaatgattgaatcacaaatttcgaatattaaatattacccaatttcaagtggtaaactacgtcgttatttatcttttgaaaatgcaaaagatgtttttaaagtattaaaaggtatcttagatgcccgtcgcgttctaaaaaaagaaaagcctgacttattattttctaaaggaggatttgtttctgttcctgttgttatagcagcacgttcattgaatattcctaccattattcatgaatcagatttaactcctggtttagcaaataaaatatctttaaaattttcaaaaaaaatatatacaacatttgaagatacgcttaaatatctacctaaagataaagctgattttgtaggagcaacaattagagaagatttaaaagaaggtaatcaacaaaaaggttatgaaataacagggtttgattcagataaaaaagtattacttgttatgggtggtagcctaggtagtaaaaaattaaatgatattattagagagaatcttgaagctttactacatgattatcaaatcattcatttgacggggcatggattagtagatgagtcttataaacaaaaaggatatatccaatatgaatttgttaaagaagaattaacgcatttattatcgattacagacacagtcgtaagtcgtgcaggttctaatgctatctatgaattcttgactttaagaatcccaatgttgctaataccactaggacttgatcaatctagaggagatcaaattgacaatgctaaatattttgaatccaaaggatatggaaaaatgattccagaagatcaacttacacaattcaaattactcgaacaactaaaacaaattgagtctcaccgtaatgatattattcatcaaatggaatcttataaagaaagttatactaaagaagacttatttaataaaatcttgaacgatgcgctttaatataggaggaccaattgatgaatagaacgaaacgcattacattgctcattgtttttacattaatctttggcatcattgcatttttccatgaatcacgtttaggcaaatggattgataatgaagtatatgaatttatttatgcatcggagagttttattactacatctattttattaggtgcaacaaaaattggggaagtatgggcaatggtttgtttgtcattaatgcttgttgcttatttaatgcttaaacgttacaaaattgaagctttattttttgttatcactatgtcactatcaggtatattaaatcctttactaaaaaatatttttgatcgcgaacgtccaacattactacgtttaattgatatttctggatttagttttcctagtggacatgcaatgggttcgacttcattttttggaagtgcaatgtatattgcccaacgtagagcatcaggaagtacaaaaggtgttattatcggactatgtgcggcacttattttactcatttctatttcaagagtttatttaggcgtacattatccaactgatattattgcaggaatcatcggaggtgctttctgtatcgttctttcaactttagtattaaaaggattatatgagcctacaatcttataaacaataaataagtgcgccttatttggcgcacttatttattatttacgtatcgttttaaaacgaacgtttattaatatttacggacacataaattaaggggggaatgacttgaaaatgattataattctaagtattttgaattataggggaaacttagaattaattgataatcattttcaattaatattataacttattgataatgattgtcaattaaaattttactttttattttattcattctagtaacaaataatttttatgataaaatattggttatattacgagaagtcatacgtttattaaaaaagaggtgtctgaaaaaatgactaatattttaatcgtagaagatgaacaaaatttagccagatttcttgaattagaattaacacatgatggttataaattagacatcgaatatgatggggaacctggtttagaaaaagcattaaataacgattttgatttaattattttagatttaatgttaccaaatataaatggactagaaatttgtcgacgtgtacgccaagtgcaatcaacaccaattattatcatcactgctaaaagtgatacttacgataaagtgactggattagattatggtgcagatgactatatagtaaagccctttgaaattgaggaactttttgcaagaattcgcgctgtattacgtcgtcagcctcataaagatattatcgatatcaatggtatcagaatagatattgatgcatttaaagtaactgttgatggcaagcaattagattttactaaaactgaatatgatttattgtatctattagcaacgaatcgcaatcacgtattacaacgtgaacaaattttaaatcatgtatggggatacaatagtgaagtagaaacgaatgtggttgatgtatacatcagatatttaagaaataaattgaaaccttttaataaagagaaagtcattgaaactgttcgtggtgtaggatatgtgattcgataatgaaaaatcatacattgcaatataaatggatgacaatcactacattgattatgtttacgacaattattttattttgtcttattattatatttttcttaaaagatactttaagagaaggagaagtggaggaagcagaacatagtttaagtgatattgtcaatttaattcaaacgcgtccgattaataatatatcgatattagatttaagtgcttcattagaaaattatgaagaagtcattatttacaatcatataggtcaaagaataatgaaatcatctaatgaaagtacaattcagtttatacctaacaacaatttacaaaagaccgatcgaattcaggtaatgcgaaataatggaaaagaatatttagttattactgaaccacttcatagtccaaactttaaaggttatagcgtacttattcattctcttgagcattataacaacttagtaaaatcactttatattattgctgttgtttttggtctactcgctacagtgattactgcatgtattagctatttcatttctaaaaacattacaaaaccgctagtaacaatgtctaataaaatgaatcaaatacgacgcgatggttttcaaaataaattagaacttgatacaagttataaagaaacagataatttaatagaaactttcaacgaaatgatgtatcaaattgaagcctcttttaatcaacaaagacaatttgttgaagatgcttctcatgagttaagaacaccacttcaaatcattcaaggccatttaaatttaattaaacgatggggtaagaaagatcctgacattttagaagaatctttaaatatttcattagaagaaatgaatcgaattacaaagctagtagaagaattattattattaaccaaagataaagtaaatatgcaatccttagaaaaagaggacgttgatatcaatgaagaaattcaatcacgaattaaggcacttcaacaactgcatccagattatttatttgagattgaattagaacaaaaacctttagttttgcaaattaatcgtcatcaatttgaacaattaatcttaatttttatagacaatgctatgaaatatgataaagagagaaagcatatatgtattaaaacacaattgcgtaataaacaaataagtattgaaattaccgatcacggcttaggcataccaaaagaagatcaagaatttattttcgatcgtttctatagagtagataaatctagagcaagaagccaaggtggtaatggtttagggctttcaattgctgaaaagattgtgagtcaatatggaggttacatttctgtagatagtgaacttaatcaattcacaacatttaaaatcaattttaaataaaaacacagatgataataatctgtgtttttttattaatataaaattaaaaaaatttatctttattgaattttttctttttacataatattcagtcaatagtctttatcaatagtcaaaatagtgctatgatagttttgtaagcggtttaactattttgtggagggtataaaatggcaaaggataaaagggatgttacggaagctccagtaaattttggggcaaatttgggtcttatgctcgatttatatgatgattatcttcaagacccaacttctgtctcagatgatttacaagtgctttttagtacaataaaaaatggcgaagcacaaattaaagctaagtctaccacagatgggagtggtacttcagcagatgatagcacaatcaaacgtgtcatgcgattaattgataatattagacaatatggtcatctaaaggctgatatttatcctgtaaatgcgcctaaaagaacgcatgtcccaaaattagaaattgaagattttaatttagataaagagacattagaaaatatttcatctggtatcgtatcagatcactttagtgatatatacgataatgcttatgaagcgttaaagcgtatggaaaagcgttataaaggctctattgcgtttgagtacaatcatattaacaataataaagaacgtacttggctaaaacgtcgtattgaaacaccttataaagctactattaatagtgatgaaaaaatcaacttatttaaaacacttgctcatgttgaaggttttgaaaaatatctacataagaactttgtcggagcaaaacgtttctcaattgaaggtgtagatacattagtgccaatgttgcaacatacattgaagcgtgctgctcaagaggacattcagaatattcaaattggaatggcacataggggacgtctcaatgttttaacacatgtattagaaaaaccttatgaaatgatgatttcagaatttatgcacacggatccaatgaaattcttacctgaagatggcagtttaaaacttactgctggttggacaggagacgttaaatatcacttaggtggcgtaaaaactacttcttcatatggtattgaacaacgtatttctttagcaaacaatcctagtcacctagaaattgtagcacctgtagttataggaaaaacacgtgctgctcaagatgatacacatcatgcgggtggaccaactacagattttcatcacggtatgccaattattattcatggagatgctgcatatcctggtcaaggtatcaattttgaaacaatgaatttaagtaatttagatggttattcaactggcggagcactgcatataattacaaataaccgaattggttttacaactgaacctattgatggtcgttctacaacgtattcatcagacatcgctaagggttatgatgtacctattcttcatgtgaatgcagatgatgtagaagcgacaattgaagccattgatattgctatggaatttagaaaagaattccacaaagactttgtcattgatttagtaggttatcgtcgatatggacataatgagatggatgaaccatctattacaaatccaacattatatcacaatattagaaagcatgattcagttgaagtgatttatggaaataaacttgtagatgaaggtattttaacgaaagaacaaatgtctgaaatgattgattctgtacaaaaagaaatgcgtactgctcaagataaaattgataaatcagataaaatgaatagtactgcaatgaataaaccagaatcgcttcagttgcctttacaaagtgatgaaaaagagtttagctttgaacatttgaaagaaattaatgatgcaatgttaaactatcctgaagatttccatgtatttagaaaattaaataaagtattagaaaaacgtagagagccttttgaaaatgaaaatggtctagttgattgggctcaagcagaacaattagcttttgcaacaattgttcaagatggcatatcaattcgtttgacaggtcaagatagtgaacgtggtacattcagtcacagacatgctgtactacatgatgaagacaatggcaatacgtatacaccgcttcaccatgtaccaagtcaaaaagcaacatttgaagtgcataacagtccattatcagaagctgcagtcgtaggctttgaatatggatataatgttgaaaataaaaatagtatgaatatttgggaagcccaatatggagatttttcaaatatggcacaaatgatgtttgataattttatgtcatctgccagagctaaatggggcgagcgtagtggtctaactttattcttaccacacgcttttgaaggtcaaggtcctgaacattcatcagcacgtttagaaagattcttacaactggcggctgaaaataatagtacagtggtcaatctatcaagttctagtaactacttccatttattacgtgcacaagctaaaagtttaaatactgaagcgatgagaccattaattgtgatgtcacctaagagtttgctaagaaataaaacagtggctaagccaattagtgaatttacaactggcggtttcaaaccaattattgttgaagatgctcaaaaagctaaagtaacaaaagtcattttagcttctggaaaaatgtttattgatttaaaagaaacattagcaaaagaacctaatgaaaatatacaacttattgctgtggaaagattatatcctttcccagaggaggacattaaaaaagctttagaagaattaccaaatttagaatctgttgcttgggttcaagaagaacctaaaaaccaaggcgcatggttatttgtttacccatatcttaaatctattgttggacatcaatataatttaagttatcagggtagaatacaacgtgcagcacctgccgaaggtgatggagaaattcacaaacttgttcaacataaaattattgaaaatagtgtcaaaaataactagggggaaatataatggcagaggtaaaagttccagaattagcagaatcaattacagaaggtacagttgcagagtggctaaaaaacataggggataatgttgaaaaaggagaagctattcttgaattagaaactgacaaagtgaatgttgaagttgtatctgaagaagatggtatacttcaagaacaacttgcatctgaaggcgacactgtagaagtgggccaagctattgcaattgtcggtgaaggtaaaggtagtacaagtagttcaagcgaatcacaaaataacgattcaaattctgaaaatgaaaacacaaaaacagattctgcagaaactaattattcaacaccacgcacttctactgaagcacaaggtagcgatacaagttcaaatgacgactcagaatcaatcaataataaaagagtgaatgcaacaccatcagcacgtcgtcatgctcgtaaaaatggtattgatttaaatgaagtagctggaaaaggtagcgatgtgataagaaaagaagatgttgataatagtcaaaaaccaagtcaatctaatcaaaatactcaacctaattcacaacaagaaacatctaaaaaatcaactgctaatacgcctaataaaccagtgatccgtgaaaaaatgtctagaagaaagaaaacagctgcaaaaaaattattagaagtatctaataataccgcaatgctcacaacatttaatgaagttgatatgacaaatgtaatggaattaagaaaacgtaaaaaagaacaatttattaaagatcatgacggcactaaattaggatttatgtcattctttactaaggcagcagtagcagcactcaaaaaatatccagaagttaatgctgaaattgatggagacgatatgattactaaacaatactatgatattggtattgctgtttcaacagatgatggattattagtaccattcgttagagattgtgataagaaaaactttgctgaactagaaaaatcaattgcagatttagcagtaaaagcacgtgataaaaaacttggattagatgatatggtaaatggttcatttaccatcactaatggtggtgtatttggttctatgatgagtacaccaattattaatggtaatcaagctgctatcttaggtatgcattcaattatcactcgtccaattgctattgataaagatacaatcgagaaccgaccaatgatgtacattgcattaagctatgaccatagaattattgatggcaaagaagcagttggattcttaaaaacaattaaagagcttatcgagagcccagaagacttattattagaatcttaatttcgtttattaaagagctaaatatattgaaaccttaatcaaaaattgataaagagtagaataagttcataatgaatttattctactctttttatgttttagttatattagtattaaaaaaattgagaatataaaaaataacagagaagcgcatccctcattatccatttatgacttttccaaagcagatgctaatatgtataaaaatgataaattaagtattatatttggacaaaaaacaacaaatatttttaaggatattccaaacgaattcataaaaaaataatagtcattaaagctacaataagttaaaaacgaactttatataatttatcaagtttgttttaagacaattaaataacctatgatatatcccccctacctatataaaacaaagtaggggagggataaaatatatatattatcttatatatattttatttattatacacactttaatcatatataatatttttatttacgtatattttataataaaaaacaatactcttatttaagagttcaacatattattcatatataaaatacgttataatgtttaagaaaagatatataaatgggagtgtcgatgaatgagtggactaagaagtgttacgattggaacaagtgatctctcaaaaacacagaatttatttcataatattttaggtcttaatgttgcaacaaaaagacaagcattacgttttggtgatgctgaattaaatcctggtacaagacttcactttgtagaagttcctaatcctaattatagaaatgtacatatatcaagcgtgggattaagaacaccatcgaatgctggtttagaagaataccaacaaatattagaaaaaaataatattcaatttagttcaatcactgaattaaacggtaatcagcactttaattttaaagatgataatcatcaaatttttgatatctattctaatgaactgaatgttggtgttggattaggcacacctacttttgaaagtgctgttaatcctcttcatcaaattcaaggattgggaccagtaattattaaagtaaacgaattattggttacaacttctatctttaaaaatgtatttaatttaacgcattatgctgaatatgaatctactgaatttcctgatcaaactgtccaggtatttaaaatcggagatggtggacttggtggagaaattcatttatatcaatctaatgatcaagttgaattaaaagaagaaggaattgtggaacaaattgaattcagtacaaattcaactgaagactttgaacatgcacaaaaagaactggatgaaataggtattccttatcaaatattaaatcaaggtgatgctcaatcgttacgcattactgaaggtagcggcatctctttcatatatactttagaaaaaaattaatataaatcattttattggaggatttaaaatgggaatgttacatgaagattggaaatcacgcacaccaattaaacaagtgatggtagttaatactgatgcaaaaaaattcacagtatcagatatgcttactattggaaaacaatatgatgtcatcaatgaaactgaagaatattatcaaatcattgataactctgatctagtaggtggttattacaaagattattttaaagaagtttaaatacattcaatttctaaaaagataacgattaaattaagactcagagtgatgtgccaatatctatacatttatacacgctcttggtctattttttcatcttataaaggagaatattaaaatgccaaataatcattatatcaattcagatcaatctgtattcaatgatgcaaaagcattgtttaatttaaataaaaatattttattaaaaggccctacaggctctggtaaaacacgattagctgaaactttaagtgaagtggtccaaacgccgatgcatcaagttaactgttctgttgatttagacgcagagagcttattaggttttaaaacaataaaaacaaatgaacaaggtcaacaagaaattatttttattgacggcccagttataaaagccatgcgagaaggtcatatcttatatattgatgaaatcaatatggctaaacctgaaacattacctattttaaatggtgtattagactatagacgtcagttaaccaatccttttactggagaagtaattaaagcagcccctggtttcaatgtaattgctgcgataaatgaaggctatgttgggacattaccaatgaatgaagcattaaaaaaccgctttattgtcatacaagttgattacattggaggagacattcttaaagatgtcattaaacaacaaagccaacttcaagatgatgatataattaaaaaaatcattaaatttaatgaagacttacgtacaatgtcaaaacaaggacaaatttcagaagaagcagctagtattcgtgcgttaattgacttaagtgacttaattacagttatgccaatagagagagcaattaagcgtacaattatcgataaacttgaagatgaacgcgaacagcaagccatcagaaatgcaatcgaactaaacttttagagagggattattatgagtgatcgttttataaaatttaatgatgagcagctagatgctaagcaagtcatgatgttacaagatttagcgcgcttactactgaaaaacgaacaaactaaagtaaaaattcaaaagttcccttattatgatcctattaataatactttaattacaagttggttttggtctcatcgtccaaaagatattgaaagtgcagggttaaaaacagatgttatgctcgctgcatatggttataaaatgatggacgaagctatcgtaaatgaagtccttcatgataatgaatttagccatcccaaattttatcatcaactctttagattgctagaagatatgcgcgtttttaattttattaaagtggatcggcctagcactgctaaacaaattgatttaagagtgaaaactcgattatcttatacggaatcacaaattaaattctataaaacaaaaacggtatatacagatttacttttcttatatttagagcgagcatttttaagtcaaaacttctttgatatacccacgatacatccacaattagatgacatattaaatcatatgtttcaatatttacctgattttttccaaaatgaatcatctgaagataatatgtatcttgcacaacgtatcatgttccaaatcgatgaaatgttatcacatgatatgttaaatgaatattatcatcttcctagaaaagtatatgaagctattcatgaaatgtcttatgaggatattaaacgtatggatgcaagtaacgttgatgggcaagataatacaaatcaagaaactgacactacatcagccgaagctgaaacaaacgctcaagatagtaaatctgaaggtggcgcttatcttgaaatggaattacatgaaggtgaaaatagtgacgtcatgagtgataacgacactgcacgtgaaggtgattcaactgacgatatgacagatatgatgacgaaaaaaggacgtggctctaatcattcacttgatcgtgacgaaggcggttctataggttctaatccatcatttgctttacgtggtattaatgaaaatgtcgaaatagaatggaaagtgcctgatatagagccagagtatatttcaagctaccaacaagttaaaaatgaagtacaatttgaaactaaagatttaattcagattataaagaaaaccatcgatagagaacacgtggacgaacgtcataatttgactaaaggtcgtcttcaacgtgatttaaccaattggtttattgatgatcaatataaattgttttataaaaaacaagaccttagtaaaacattcgatgcgacttttacattactgattgatgtatctgctagtatgtttgataaaatggaagaaacgattaaaggcgtcgtattatttcatgaaacattaaaagcactcaacgttaaacatgagatacttgcttttaatgaagatgcttttgactctgatgatcgaaaacaacctaatatcattgatgaaatcgttcattacgatcgctccatcatggaaaaaagtggaccacgcattatgtcattacatcctcaagatgataatagagatggcgtagctatacgaattgcaagtgaacgtttattaagaagaagtcatcaacaacgtttcttaattatcttttcagatggggaaccttcagcatataactatgctcaagacggtattttagatacgtatgaagctgtggaaatggcacgtaaatttggaatcgaagtatttaatgtctttttaagccaagatccaattactgaagatattgaagaaaccattcataatatttatggacaatttgcattatttgtagaaggtgttgaaaatttaccgagtcacttatcaccattgctaaaaaaattgttattaaaatctttctaatcataatcaataattaaactgtatattgatttataatattcaaatttttgtgacatacatagacttgtaaattctttttgtgctagaatgttaaatattgcaaacatatacataaaaaggagcaagtctatgaataaacatacttggattatcggctttacgctatttgctatgttttttggcgcaggtaatctaatttttcctcctaatttagggcaagaaagtggtgcctatttttggccagcaattttagctttttgtttgactggaataggcttaccattacttggagtagtcgttggggcacttgataaacaaggatatattggtgcctttaataaactgtcaccgagattttcagttgtctttctaattattatttatttaaccattggacctctatttgctataccacgtactgcatctacgtcttttgaaatgactattacacccattactcattcaaatagtaatatatctttattcatttttacacttatttattttattattgttttatatttatgtattaatcccggtaaaatagtagatcgaattggatctttattaactcctttattattaattacaattttggctatgattattaaaggatttgtaaactataagggacacggttcatctcatggaaatccagaaacatattcttcaaatatagaaagtttttcccatggctttattgaagggtatttaacaatggatgcaattgcagcaattgcattttcaatgattgtggttaatgccattaaagcaacaggagttaaacacaccaatcaaatatttaaacaaacagtgatagctgggtttattgccgccttagcattaatttttatatatgtttctttagggtatattggtaatcatatgggaataagtcaaaatacgattacaactctaatggctaaaaatcaaaatataggaacttatttacttactacaatggctacaaatggctttggtgttctaggcaaatacttactaggtatcattgttgctttagcttgtttaactacagcttgtggacttattgtatctgtgagtcaatactttaatagtatatttccaaaaattagttataaggtatatgttataggttttacaattatcagttttatattggctaatttaggattaaattctgttataaacatgtctgttcctgtattaagtattatttatcctgtagctattactatgattattttaatcttacttgcgcgttttattccaactaaacctattgcgcaacaaatacctattatcattgttagtcttgtttcaattgtaagtacaataaatacgttaggtttaataaaattaaatgttataaatcatttacctcttaagcaatattctttagaatggttacctatagctatcatttcaatcataatagggtatatcgtatctaagtttataaatcaatcgtatattgtttatcaaaaggaatagatatactaaacaccggttacttctttaaatgagagcaatcggtgttttaattttatctattcttttttcatagtaagtaaatgttcttttaactcattctcgagttgtgataattctctttcagcttgttgacgtttttgacgtccattatattgaatttgcagtgtttgttcaatcgtttcaatgatgtcattttgagtcgctttaagcgtttcaatatctacgataccacgttcattttcagtagccgtttcaattgcattttgttttaacatggctgcatttcgagtaagcaagtcatttgtggtatcagtaactgcacgctgagctgttacagcatttttttgtctcattaaagtgagagcaatagccatctgatttttccataaaggaatacttgtgagaatagaactttgaattttttcggctaatgcttgattcacattttgaatcatgcgaatttgcggtgctgtttgaattgctatttgacgtgataattgtaagtcataaatttttttatctaatcgatcaacaaattgctccatatcagcgacactttgaatatccatttgattaccagattgttctgcatgttgacgcaatttaggcaattcattagcatttatgtcttgttttttacgctgtgcagcagcaatatatagagaaacatcatcaaaatatactttattttgttcataaagatggtcgagtaactgaatgtctttagttaaatttcctttatgcttatccaattgaatggtgattctatcaacttgtgaacttacagattgcattctagagaatacttcatttattgaagcttttgttcgtctaaataaacgtttaagtttagattgattgtcttgattcaagtcatcaggattaacttcacttaacttagacattaattgatttaaagtatcaccaataggacccacatctttcgattgaacttcatctaacatttgatgtgaaaattgagacatgttctgctgtagatgtgtcccaaaagataataggccttcactatctaatggtttgatttgttgactaattgaatcaattttttttaaatcttgttcgttaaattgttgtttaaagtcttgcttaacattttgagttgaaacatcatgcgtttgatgatctatataatcatctaatggatgtgagttaataaattggtctttttgattcatttaaaaattctctccattccttatcttaactttaaattattattctttatatcgtttttgttgtaaccgattaagttccatttcaatatctaaacgctcataatcatcttcattaagtctttttaaatctgcaataagtgtacgtttcacttcatctaaagtaatacgtgttcgctctaatttttgcttttctttagcagatttttttggcattttagacaaacgggtatatgcatcaattaaatttagtgcattatctatatgcgaataaaagaaactttctaccttgaagaatgatgaaggtctctgtttaacagcaaaatgaatagacttagaaattttataaatatcattaatttgacgaaaatctttaatcgatctgatattaatatatgattttaaaatattacgaattttattatgtgattgattgagttgctgattaacaaaacgatagtctctacgtgataatccaatttcatttaaatattttttggatgtcaatctttgagtaggaaaataagatacaaaaaacattccaatacctattagggcatcaagtataaaggataaatcaaatccaaatacacttgtcacccatgagataatagctattggaattcctactaaaacacccagaagtcgagaaaggttatatctcaatattcatcttcctttatttaataaatcgttttaaattctgagtatctatttgttgtgtctaaatcttcaatactataatcagaaactgaagatgcaggagaagcaccagcaatcactttatcaataaatgattttatttgttcctcgtcaccttgagcatatatatctacataatcctcaacattttgaacagtaccaaatatatcaagtttttttgcaattaattcagtatgatgacggaaccctacaccttggacagttccaaatacttgtatatgtttacgttgcatcattatcacctctacattatattatacgtatttttcctacaaaaaactaataattaatacacatatcatctttatctcaattaaaagaacgaagtctttaagcttgaattcgtctaaaaaaaagttacaatatttattagagttttaatttgagaggggacttagtcatgtggacagttgcaaagattcgtgctgactacgagggatggtggttatttagcgactggacagaaaaaatcgtagaacaacatcattatagtaactatgaagaaatgttaaaagattatcaatcaattattaaaaaaagtaaaaaatattataataattatgttattgggaaatataatatttatgcattttataataattgtgatttaaatttttgtgaagattgtgatgaagatttacaaatattttatagttttattgttttaaataataaagaagtttattataatctaccaaaaattaattaaaagagaattttctataattgtattgcaatttagttcaaactaacatataatagttaccaagcaatagttttattccatattgcaaagaatatctgtaatattgattgatagcattttgttatttatacatatttataacacgtattttttgtaatatgcgaataatgcatattgaatgaattttagtcttggaggtttcacaattatgaaacaaggtacagttaaatggtttaacgctgaaaaaggttttggcttcatcgaagttgaaggagaaaacgacgtattcgtacacttctcagcaattaaccaagaaggttataaatcattagaagaaggtcaatcagttgagtttgaagtagttgaaggcgatcgcggtcctcaagctgcaaacgttgttaaactataatttatagattgcaaaaattgactttagtaacaccttaccaagatgtagggtgttttttatatataattgaggctgggacataatcccagaaaaatagccagtaaatgagttttaaaaaactcatttactggcttctttatttatgatactttctgttattggatcattttcttaaagaacagcttcatcctgttccttcaagtatttcgccaacatactttatcttcaattaaaacaattcttgatatctgaattcaatgaattcaaatatcatcatggtgcaacattaacgggtaagtataaactttttcgttattttattttgtatcattaattattaattgacgtaatgattgacgtttaataacttcacgtgcttttccatcttttaagaagaaaacaggtggtttttgcatttgattataattagatgccatagagtaatggtatgcgccagtagataaaatggctaaataatctccacgttttacagaagaaggtaacatagcatctcggataataatgtctccagattcacataactttccggcaatagttaccgtttcgtctgcctcctcatgacgatttacaagtaatgcttgatattttgctccatataaagcagttctaatatgatcactcataccaccatcaatagaaacatatttatttacttcaggaatgtctttaattgttccaacttcatataaagtaatgcccgcttcgccaacaattgaacgtcctggttcaataccaatttcaggaacgtcgtagtttaatttttctgattcagatttaatcgcatctgtaatttcagcaataccttcttcaatagggaagctcacatcgccttcgacatatttaataccaaaaccaccacctaagttaagtaattcaacttggatatgatgctcattaagccaatttaaaacaattttagctgtttcaatcatagcttcagtaccctcaatttgtgatcctacatggaaatgtattccttttaaatgaagatgctttgatgctttgactttttcaactgcttgaattgcaagaccatggcgaattgaaagaccaaatttactatcttcttgaccagtttgaataaattcatgggtatgggcctctactccaggattcacacgaatgacaacattaactgtatcacttgcatagcgatcgattaattcaatttcttctaaagaatcaataacaaagtagccaacgccactttctaaagcatattgtatttcacgtttcgttttattattgccatggaagtggatgcgactaggatcaaatttagcctctaatgctgtataaagctcaccttcagatacgacatctaattgtaagttttcttcttgaactaactttaccatttgaatgcaagtaaaggctttagaagcatatgaaatattgtattttaatccacttttttgaaaagcattatgaaatcgacgcatttgattgcgaatttcatcttcatcataaacaatggtaggcgtaccaaaactttgagctagtgttttcaaacttgtacccgccattgttaattcaccataatcattatatttaactgacattttatctaaactcctttataagagaatcatgattcatcgcactaagttgttctgaattagcgccaacacctttgaatgtgtattcatcaatgcgtatatcattattatatagtatcacttcatcttgtgcatgaacatcatcatcgacttcaacaaacatgtgactcatcattaatgctcgaatagggtaacgtttaccattaattaatgcttcgtgtgttgcacgtttttttaaaataccatcaccatagccaatatcaacaactgcaagatgtgtatgatcatgcattgcttcaaatgcaaaactataaccacaataatcacctttatttacttcacgaacttgaattacatttccttttacggttaaggcttgttcaatctcatgttcatctaatttgctatatggtcttgaaccatataaagcgatacctacacgtgcatgtgtatgatagggaagaagttgttgtccttcgcgataataactcgcactgttttgcgcatggataagtttaaattggtatccttcatttaataatgtattaacgacgtttaaccatgcttcccgttcaatcccatactctggaacatcaaattcatctgcatacccaaaatgcgtccataggccaacgatattcattttacttccattatcattttcatgatgatgaagtacttctttaatttcgtcaagatttttgaaacctgaacgatggagtaaattttcaaattctaagtgaacattaatatcttttaattcacttttgtactgataataatattctaaagagggaagcgtcatttgaatattattatttcgaactgtatcaaagtcataaactgcattcattaaaaagattgtagcatgaggcgcaagtttacgaactctcactgcttcttttaaggaagtagtactaaatgtatggatacccgcttctaaaaatgttcttactgcaaactctaatccataatgataagcattattttttacaactgccattattgattgattattctttactttagttgcatttcttaaaaatatttttgaatcaactgaccaaactgctgtcaatttaatttactcctttccataatggttcaatatttgttcatagtaattggcaacatcaataagcactttttcgtcaaaatttaaatgcgatgtatgtaagcctgtgataaagcctttatcttcatttcgagttcctacaaaagcaaagtaagacggtgctaattgttggccataaaaactaaagtcttcgccgaataaaaatggcagaggcttttcaataacttctaaattagcagatagaatagatttttcaacgatatgacgtagtttaggactattcattgtagcaggatatccttcttcaaatttgacttcacaatcaacattgaataataatttcacactttttgcaattttattcatttgatttttcacaatatttaaatcagtggcatcataagtacgaatagttccttctaaataaccgttactaggcaccgtgttaattgcttcgcctgcattaaagtggcccatatgaacaatattacgttttagtccatttaaatgatattgctgtatttgaccaacttgatttaaaacatgaatcagtgcttcgccacatgaatgaccttgctctttatcagctacatgactagataatccttttaggaaaaaacgatattcagtggcacttgctgtaatttcttcatcgcgtatcacgacttgtccttcctcagcgaaaggattgacatgaatgccaaatactgcttcaataggatattgattaaaagcacctgctttaattaagcgatttgcgcctccgcctgtttcttcagctggttggaagataaacacgacattatgaggtaattgatgttgatcagccatcaccttacatcgtttaacaaataacatcaatgctgttgtatgaccatcgtgaccacaagcatgcatcacattatctgtttgactacgataatcgacattattttcttcaaaaatgggtagggcgtcaatgtctgcccgaaatgcaattgtatggtcactattaccttctaaatatgcaatagcacccgtttcaagaggttgttcgtaaggtacatttaattcatctagaaatcgagtaatatattgagttgtctcaaattcgtgaagacttaattctggatgttgatgtaaatgtcttctatgttgtgtgacaaattctaattcgctcatcttaatcaatcctttattcatttattattcaacttatgtattcatttaattgtaaaggctgagaacatgttgtcccagcctttagcattcaattattcaagtttgtcattaatcatttaattttcttaacgctgcaacaatttctcgtttagagtcttgaacttcagatgtttgtttaatgactttagcaggtgtaccagctacaaccgcaccggcaggaacatcttgagtcacgatagcaccagcagctacaatagcgccttcgccaactcttacgccttctagaataactgcgtttgcgccaattaatacattatcttcgattactactggagaagcactaggtggctcaataacgcccgctaatactgcaccggcacctacatgaacatttttacccgttgtcgcacgaccacctaatgttgcattcatatcaatcatagtgccttcacctacaacagcgccaatattgattgttgctcccatcatcacaacggcaccgtcttcgataatagcttgttcacgaatgaatgaacctggttcaatacgtgcatttgtattggttaagtcttttaaaggaatagcagaattacgacggtccatttcaatttctaagtcagtaatatgtgattgattggtttcataaaatgttttccaatcatccgcttcacaaaatattacttttgaatcatcagatccgaatactttaaatgtattaggaaaagtgacgtcattgaattgtccatttacgtatacttttaatggtgttgattttttagcatcactaatatattgaataatttcttgtgcagataagtgttgtaccatagtttagaatctccttaagttattttataagttgtcaaatgtatagaaaccatttgattttgtgtttaatttttcagcagctgtaattgcgccatttgcaaaaatgtccttagattgcgctttatgagaaatggtaattgtttcatctgtgccagcaaataaaacatcatgttcgcctacaattgtaccgccacgaactgaatgaataccgacttcatctttttcacgtttttcagttcgctcatgtcgatcgtaaacaggcgttacattttcacgtaattctttaataacatcataaagtttgactagcgtgccacttggcgcatctacttttttattatgatgagcttcagttaactcaatatcataatcgtgtaaaaggggaacagctgcttctagaattttagttaatgcatggacgccataactcatatttgcactgaagaaaacaggcatacgttcgcttaattgttctaatttttgaattagtttttctttttcaccagtagtagcaatcactaaaggtaattcaaaaccttcatctaataaaggtaataatagattaggattagagaagtcgatcgctacatcagcttcattttgtgcgtctgcaatatgatgataagttttatatggtgaatgttgatgttcttctggctcaattgtaccaataatctcatgacctttttcttctgctaatctggcaacgcgttgattcattgtgccatatccaatgagtaaaattttcatttttattcctccgctttaaatgctttataagcattcactaatacatttgctttttctttctctagtggtaataaaggtaatcttaattcataatttccaaatcctaaatgacttgttagagctttaattggaatagggttgacatcaactgaaagtgcatctaacaattgaccaattggttcaaagtctttctcaatttctttcccattttgtttagcatcatagagtgcttgaaattctttcggaataacgttagcaatgacagaaattacgccattacctccgcgattatagaattctacgacattatcatcattaccactgtaaagagcaaattcatcttgatgaatacgttttttcacttcttcgtaatagttaaagtcatttgtagcatctttaatagctacaatataatcattatgacttaatgtttcgactgtttcaggatcaattgtcatattcgttcttgaaggtacattatataaaacaacaggtaacttaacttcattcgcgatagtttcaaaatgtttaattaagccacgttgattcgttttattatagtaaggtgtgattaacataataccatctacacctaattctttagcacgtaatgaagcttgaatagatttagctgtattatttgtaccagttccagcgataatagccacttgatgattaacttgtttaatcactgcttgaagtactgtttctttctcttcttctgttaaagtagggctctctgctgtagtaccgtttacaataattgctttaacattattatcaagtaaaaattgaacatgttgttctaatgctttatagtcaacttcattattagtaaatggagtagcaagcgctacacctacaccttcaaaaatatgtgccatattatctagctccttttaatttaatgacttgttctaacacttgaactgcatttaaagctgcacctttaagtaggttatctgaagtacaccaaacatggaaagtattatcaagtgagtcatcacgacgaattctacctacaaacacttcatctttacctgttgaattaatagctaaaggatattcattattttcaggattatctactaaaacaacacgattatcgttttcaaataaatctttaatttcttgaactgttgcttctttatcaagagtaacatcaatttctacgctatgactatcttgaacaggtacacgtgcacatgttgcagtcacacgtaagtcaggttgtcctaaaatttttcgtgtttcatcaatcattttttgctcttcttttgtatatccatcttctaagaaaacatcaatatgtggtaaaacattattataaataggatgtggataagcttctggagctttaccattcgcaccttcagctaagtctctcttacctttaatccctgaacctgaaactgcttgatatgttgtataagctacacgctttaatccaaaagcatcgtataaaactttgagtggcacgaccgactgaattgttgagcagttaggattggcaatgataccacgtttaaattctggttggttaacttctggtacaattaagtccacatcgtttgccatacgccattgacttgaattatcaataacaattgctccagctttttcgaaaataggggcaaattctttacttgtttcgccacctgcactcattagcacgtaatcaaatttttcacttgctgcttcttctgtaagttcttgaactgtatatgttttcccttgaaactcaatttcttttcctgctgatcttgctgatgagaataatactaactcatcaaattgaatatgtttacgatcaattgtttctaacatttttgttccgactaatcctgttgctccaactactgctaatcttgtcataaaagaatcactccatttaaatattaattgaattttaaattacttattttaacttaagtttaaatatcaaaagcatcgtataaaacttcaaccgctttattttcattttctgcatcaataacataagaaatactaatttcagaagttgttgtttgataaaatggaatattagaattaattaacgtaataaatgcttttgaagctacaccagacatatcacgcattcctgaaccaattaatgaaattttgacgtacgcttcattaattttataatctaatgcatcaaatgttgtagaaagttcctctaagatacttgaaatttgttgtacatcactatctttaatagaaaaagatagttgtaaaccttcaacatttacgatttgagaaatcatatccacattaactgaaccttcatctaaagcagtaaataattgagttagaagtcgattatctggaagaggataactaattgttacatgcatcatatgtgtatctaatgcaactccagttacggcttttttttctaatatttctgttcttggcataatccatgttcctttcacatttgataacgttctacctaaatacaaggggatatcataatttttagcaagttctacacttcttgtttctaacacaccagcacctaaagcgctcatttccatcatttcttcataagacacataatctaaacgttttgcctcactcaaaattcttggatcagtagcataaacgccatcaacatcagtgtaaatttcacaagggatttgattactagctgctaatgcaacagcagtcgtatctgaaccaccacgaccaagcgtagttaactctaattcgtcgttcactccttggaaacctgctacaactaaaacatccttgtctttaaattccttgttaaatgtttcaggattaatttctgcaattcgactttttaaatgatgacctactgttttgatacctgcttgatatccagtcatagctctagcacttacgccaatatcatttaataccatcgacaaataagaaactgtttgttgttcaccagttgttaataatagagcaagttcttcatcttttggtgttgttgtaagatgggaaacatttttcattaattgatctgttgttttgcccatagcacttacgacaacaataagttgttcaccgtcatctacacggcgtttaagcatttctgcaatattttttatctttgtaaaatcggcgacagatgaaccaccgaacttcaaaacacgtcgtttcaagattttacctcctagaatttaggggcacacgtcataaaaaagagcaagttcggaatgtgcgaacttgctcgtaatttatatacaagtgatgcactccattattaaataataatgacaaactctcagctcttaaccacaaagtccaacgaacgcttactgcggttgcaattcgtttcggcatcgcaccctttctatattagccgtggcagacagtattctaatatatactaatgattgatgcgcctcatcaatttcttattcaattactatgtttttaattatacataagcaccttttaactgtaaaccgatttttgtgattttttgaaataaactgaaaattattaaagtaatattactgttaaagaaaagagatagtaataataagtaatttgtgtaaataataacaataattcgaaaataatagtattttataaaaaaactgtcgataaagttcgttatttatcgacagttttatgcatagtttaaattttaaaaatagaagataccttattaaaatcctgttattttatttttgtaacacaccaatttcttttagatattcttcatatggcaattctttagataaactacttggttggttcaagtcaatcacacgattagcgattgtattaataaattcaaaatcatatgaagtaaagataattgatcctttgaatgaagctaatccatcattaacagctgtaatgctttctaaatcaagatgattcgttggctcatcaagtagtaaaacattggcacttgaaagcatcattttacttaacatacaacgtactttctctccacctgataatacacttgcttttttcttaacttcttcaccgctaaataacatacgtcctaagaagccacgtaaaaatgtttcagtttgttcatcttcaggagcatattgacgtaaccattcaactaaattcatatctacgccttcgaagaaatcagaattatctttagggaaatagcttaatgaagttgtcactccccatttaaatgaaccttcatctggttccatttcaccagcaagtatttttaatagggtagttttagcaatttcactatcgccaattaaaatagctttatcatttggattcatagtgaatgaaatgttatctaaaactttttcaccatcaattgtttttgagataccatcaactactaataaatcgttaccaatttctctttctggggtgaatttcacataaggataacgtcttgaagatggttgaatatcatcaagttcaattttctctaattgcttcttacgactagttgcttgttttgattttgacgcattcgcagagaaacgagcaatgaagtcttgtaattctttaattttttcttcttttttcttgttttgttcttgagccattttttgagcaagttgacttgattgataccaaaaatcatagttaccaacatagactttgattttgccaaaatctaaatctgcaatatgtgtacatacattatttaaaaaatgacgatcatgagatacgacaatgacagtattttcaaagttaattaagaaatcttctaaccaactaatggcaggaatatcaagaccattggtaggctcatcaagtaataaaacatctggatctccaaataaactttgtgccaataatacttttactttttgattattttctaactctgacatttgcttatcatgtaaatccggggtaataccaagtcctgatagtagggaagctgcatctgcttcggcattccatccattcatttcagcaaattcaccttctaattcagctgcacgaatgccatcttcatcactgaagtcaggtttcatataaatttcgtctttctctttcatcacttcaaatagacgttcatgaccttttataactacacctaatacacgttcatcttcataagcaaagtgatcttgttttaatactgctaaacgttcatctttcccaagagaaacatgacccgtttgtgaatcaatttctccagataagatttttaagaaagtagatttacctgcaccattcgcaccgataagtccataacaattaccttcagtaaatttaatatttacatcttcaaatagtttacgatcaccaaaacgtaaacttacatccgtaacttgtaacattcatttactcctttattcatcgtttatctaacgcaaaaaattatatcatataatgttcctatattcgaccttatatcatttatgtcaatgatactttacaaaactcatgttataatacttagaaatacactgcttaaaggagacaactatggcattagacaaagatatcgttggttcaattgaatttctagaagttcttggattggaaggctctacttatttattaaaaggtccaaatggtgaacaagtgaagttaaatcagtcagaaatcaatgaggaagatgaattcgaaattggagaagaatatagtttcttcatttatccaaaccgttcaggtgaattatttgccactcaaaatatgcctgatattacaaaagataaatatgattttgcaaaagtattaaaaacagatagagatggtgcaagagtagatgttggtttaccaagagaagtgcttattccatgggaagatttacctaaagttaaatcgttatggcctcaatcaggagattatgtattagtcacattaagaatcgatagagatcatcaaatgttcgcgcgtttagctagtgaaacaattgtggaaaaaatgtttacacctgtatctaatgatgatatgcaaaatcaagtattaaaagcaagaccttatcgtttattacgtatcggtacttttttattaactgaggatggttacaaagtatttgtacatgagtctgaacgtaaacatgagccaagactaggcgaagctgtagaagtacgtattatcgggcataatgaaaaaggtgaattgaacggttcattcttaccactcgcacatgaacgtttagatgaagatggtcaagtcatctttgatttgttagtagagtatgatggtgaacttccattttgggataaatcaagtccggaagcaattaaagaagtattcaacatgagtaaaggttcatttaaacgtgcaattggtcatttatataaaagaaaaattataaatattgaaactggaaaaattacattaactaaaaaaggtaaaacccttattcaagaataatgagttcatgaaaaacgagtttcttctatattatatagatagttcaaaaccattgaaaggtaacactttcgatggtttttttatgggttttatttatataaaacataagttttttgataaattaacaaaatatttacaattactctattttacattaacaaaaagtatgtaatataagcattgtaagaaatacatataacattttgggttatctataattaggaggatgttttaatgaagaaatggcaattagttggtacaactgttttaggtgctactgttcttttaggcgcatgtggcggtggaaatagtggcggcagtggttcaggagatggaaaagaccttgaaggttctgcaaaaggtgaaggttcatctactgttgctccaatcgttgaaaaattaaatgaaaaatgggctaaagatcatccaagcgcaactatttcatctggtcaagcaggtactggcgctggttttgaaaaattcatcgctggtgaaacagacttctcacaagcttctagacctatcaaagatgaagaaaaacaaaaattagaagacaaaaacattaaatataaagaatttaaaattgcacaagatggtgtaactgttgctgttaataaagataatgactttgtaaaagaattatctaaagatcaattgaaaaaaatctacagtggcgaagctaaaacttggaaagatgtagattctagctggcctaacaaagaaatcaaagctttctctccaaactcaagtcatggtacttatgacttctgggaagaagaagttatggataaacaagatatcaaagctcaaaaaaatggagatactaacgttatcgttcaatcagttgagaaaaacaaagaaagtattggttacttcggttataacttctataaacaaaataaagataaattaaaagaagttaaaattaaaggtgacgatggtaaatctgtagaacctactaaaaagactatccaagatggttcttatcctttaagtagaccattattcttatatgttaaagaaaaatcattagaagataatgatgttatgagagaattcttgaaattcactttagatgataaaggtaaatcagctgaagatgctggatacgttgcttcaccaagcaaagtttataaagatgaaattaaagaattagataaatacaaaaaagattctgacaaataataatcattattaatataaagggctgggaattaacaactcatgtaaatgttacatgagttgttcaggatatatacatgggtgattgttaaagtgttttaaattaatttgaactcattcgttacctgataatttcctgctcttttttaaaatctattgggagaaataaaaagagagggttacatatggcttctaacactaatgttagagagatgatagctaaaaataacgctaaaaaaggtggattttctgataaaatcgtgccaattattttaggaattattgctgccatctctattttaacaactatcggtatactatttacgttaatcactgaaacaatcacattctttacacgtgtttcaattactgagtttctttttactaaagattggagccctacaagttctgatcctaaatatggtatttgggctttaattcttggtactttaaaaatcactttcattggtactttagtggctgttcctatcggattaggggctgcaatctacttaagtgaatatgcaagcgataaagcaagacgtattattaaacctattcttgaaatcttagctggtattccaactatcgtattcggtttctttgctttaacttttgtaacacctttattaagaacatttatacctcaactcgatagttttaactctatcagtcctggtatcgtagttggaataatgattgttccaattattacaagtatgagtgaagatgcaatggcttctgtacctaataaaatgcgggaaggtgcttttggtttaggttcaactaaatttgaagtggcaactaaagtcgtattaccagctgccgcttctggtgtaattgcttcaattgtacttggtatttctcgtgctattggtgaaacaatgatcgtatcattagctgcaggtagttcaccgacatcatctttaacattaacaagctctattcaaacaatgacaggttatattgttgaaattgctacaggtgatgcgacattcggttcagatatttactatagtatttatgcagttggcttcacattattcattttcacattaattatgaacttaatttcatactggatatctaagcgttatagagaggagtattaatatgacagcaacgactgatccaagagctaaaggtttagttgacaaaaataaagtcgaaaaaaatctatctagtcgtgataaaaaaaatagtcttaataaatggctattctttgcatgtattgtatttgctttaatcgttcttgccgcactactaattcaaacacttgtaaaaggtgtaggacatttaacacctgaattctttacaagtttctcatcttcaacaccatcacaagctgggattaaaggcgcattagctggtacattatggttaatgattactattatcccaatttctattatcttaggtgttggtacagcaatttatcttgaagaatacgcacgcgataatatgtttacaagtttcgttaaaatttgtatttctaacttagctggtgtcccttcaattgtatttggtttattaggtttaacattatttgtacgtggcgctggtattgaatcattatctttaggaaatactgttatcgctgctgctttaacaatgtcattacttatcttaccgattattatcgtttcaagtcaggaagcgattcgtgccgtacctaattctgtaagagaagcatcttatggtctaggtggaaataaatggcaaacaattagaaaagtggttttacccgctgctttacctggtattttaacgggatttattttatcactttcacgtgcattaggtgaaacagcaccattaatcttaatcggtattccgactattttcttagcagtaccatctggtttattctcaatgtttactgctttaccaactcaaatttatacttgggctaaaatgccacaagctgaattccaaaacgtggcatcagcaggtattatcgtattacttgttatcttattattaatgaacggtttagcaattttcttacgtaataaattttctagaaaatattaagcattttattattaaagttatttgggatagagagaaaggtttctgctttctctcttaaaataaaaggagttttatatatggcaaaaatcaatgtagatgaaaagaaaaagaacgttgaacaacatacaaatgatgttgttgatcaacgctcaaatcacactcatccaacaaacgacacacaacaacataacgacaatcagtcgcaaaagacaacaattgtaacaactaataatgaaaataaaaaagatattaaacctgacagtgaaagaaaagtagtttattcaactcaaaatttagatttatggtatggtgaaaatcatgctttacaaaacatcaatttagatatcttagaaaataatgtcactgctattatcggaccttctggctgtggtaaatcaacgtatattaaaacattaaatcgtatggttgaattagtaccatcagttaaaactgcgggtaaaattttatacagagaacaaaatatttttgatagcaactattcaaaagaaaaactaagaacgaatgtaggaatggtattccaacaaccaaatccgtttcctaaatcaatttatgataatattacttatggtccaaaaatccatggtattaaagataaaaaattacttgatgaaattgttgaaaagtcattacgtggtgctgcaatttgggatgaattaaaagacagattacatacaaatgcgtatggattatcagggggacaacaacaacgtgtctgtattgctagatgtttagcaattgaaccagatgttattttaatggatgaacctacgtctgcattagatcctatctctactttaagagttgaagaactggttcaagaattaaaagaaaattattctatcattatggttacacacaacatgcaacaagctgcacgtgtttctgataaaacagcattcttccttaatggttatgtaaatgaatatgacgatactgataaaatcttctctaatccttcagacaaacaaacagaagattatatttctggtcgtttcggttaatgcttaatgaaaattattagacaaaaatatgaaggccaattggacgatttaattaaagaacttcgtcgtcttggtcttcgtgtttattcaaatgttaacaatgctattgaatcattgagtgaagatgatagaaactttgctagacacgtcattgaaaaagataaagaaattaacaaatttgattatgacattaacgaacaagtaatcatgttaattacgaaacaacaacccattgctactgatttaagaatgatgatggcagctttaaaaatttctactgattttgaaagaatgggggataatgctgcaaatatcgctcatattcgactaagagtaaaaattacagatcattatgtcttaacacgtttaaaaacaatgggtaaacttgcattattaatgttagaagacttaaatactgctgttaaaaatgaagatttaacattgattaaagaaattatcgaacgtgataaagatattgacgatttatacgtgaatattgttaacacaacttatctaattgataatgatccgtttgtagctggacaagctcatttagctgcacgtaacttagaaagagtaggggatcatgtaagaaatatagcagaaagtgtttattattactttactggtgaacattttgataaatatgatcgttaaactactttatagttgatagttttattcaaactaaaaaaatcaaagtaaaggagtgagacactattcaaaatgaatagtgtctcactcctttataatacattaattatgttcgatttcatttgtaagtatttctacttcatctactaattctgaaatatacacaatagtagatttaagtggggcatttgttgttatatcaacgcctgctacttttgcaagttcaactggatttttacttcctccagcttttaacgtttctaaccatgcatcaactgctttttgtccttctttttttattttttgagagaccactgtgccaatagttaatccagctgaatacgtatatgaatataatcccatataataatgtggttgtctcatccaagttaattccatcccatcagtaagttcaaccgcatcaccaaagaattgttcataaacgtttctcattaacttattaagaaccggtgctgttaaagattcaccgttatcaacttttttatatacttctctttgatatgctgcttctagtaaatgcgtgaccatattatgataatatgtgcgagatataattgagccaatcacccatcgtttaaaacgagcatcattactattactaaataagtagtttgccattagcatttcattcattgtagaaggcgcttctacaaaatacatagatgcttctgaatctaataaatgttgatgtttttgtgacaatgtaaaatgaccagcgtgacccaattcatgcgctaatacgaaggtttctgccattttacctgtccatgaaataaatacatatgaatgcgtaaaataagggctagcacaatacgcgccagtatctttacctttattttgagcaaaatcaatccattgatgattataagcattatcaaccattttaatatagtcatcgcctaaaacacctaaagcaccgtgaatatattgttttgagtcttctattgaaatatctggttcataacttggatcaactgatatttttaaatcttcaaatcgcattttatctaagttatgaattctttgcagtattttggcatatttttgcatcacaggtgctaaatcactcatgatgacatcaatttgtctatcatacatttcacgtgtaacttcttgttcttgtagtaaataatctataacagaatcatagcctcttaaattagcctcaattttttcttgttgtacatgttgattatatgttgcagctgttgtgtgttgatatttacgtaatgcattactaaaagcttcgaaacttttacgtctaaactctggatctgaactgtcttcatattcgttttcaaaagttgcataatctaaaggatacgtttcatgattatgttcaaacgattcaaacgcaatatcaagcattttagttgttccatagagttcataagcactttgaaaagtaggtgacaaactagcaagcacttcttcaacttctgaagataattgataaggtttacgttttattaatttttctagataatgaggactattgaactgttcttttagctcttttaatttatcatcagagagtatcattatttcagattcaacaaatgataataaactagatatcttaccataagatgttgatagtttggcatttaacgtttgcgctaattcatttgtagtatcgacacttaatctaagttcagcataattacctaatcgatcaaattgtataagtaagtcttcatatgctttaagcgcatctagaataattttagtttccgataaattatttttatatttttgattaaattgagcagatttctctaatacatcatttaaagtattataaaatgcttcatcattcgtaaataaatcttctaaattccatttttcattatctggaacatgttttctgagtggtaagcctgtgttcattttattcactcctaaatagttagtctcatatatattatacataatattatttgtaaactcagttttaagcctttagtctgagtcattttaatgactaagaaggtataattatttataaaagtattgtatattacatattataaaatataaaagttgaggcgttttttatgacgatatttgatatgccaaattatctttggatcacaatcgtagcaatgatgatattaactgtcttttgtacaatggtactaaaaaaatggttttcagcagcagtaattaccttcgttgttttagcagtattagctttctttattcctaatttttataatataacgttccagcctttattaggctatgcggcttttcttgccattataagtttaatgattagtttccttttatggtattttacaagaggatggcgccgagaacgtaaagaaaagcaattggaaaaagagatgaaaaaatatgatcacgacgagtacatgtatcgccgtcgtgatagaagataaatataagggagtaggatagaattcattttgaattcgttatcccactcctatttatattattaatggtgtataacatgattattttctaaaggctttttcaattttatttaattgatgaatagttgtttcaataccaccttcactaaaataccaagcgttagcttcaaattgatatacttggtgattttttattgctttcatatcttttatcactttattatttaaagtagattggtggcgatttctttaatacgtgtattagacttgaaataagtgccttattgattattcgatgattttttaaaagggtatattgctcataataccgaaaaggtatatttagtaaaatcgtcttaataaacgataatcaaacttataagaatggatcatttttttgatataaaagtcattctttgaaataattgttattataaatcatggttccaatatcatcgatagaccgtaaattgataaggtagaacaggtaataaattatttatctgcaaaaataatttgatatcttacattatgtaaactaaataagcattcaataattgattcattaatatattcattatcaaaatatattgtgtcataaatatctacgttatatataacgtagatgatttttatcataataaattataactaattcaatcgttttagatagatcaatgttaaccaaagaatgataactaaaatatatcattgcagtgtcattaaaatagaataggtcccctaattgttatatacataacttcctataatatatattatgtaaactaaattgttgaaatctgtatttttatatgaatatcttcaatttaagctttttaacaaaatacagatatttaaagttttaatatattccttaactcatttacatatgcccatgcattctaattttatgagtatttatttaaagttattatttttctacagttcggtaatcaatatctaaagtattgaatcatggttgtcgacattacgattcatacaatcattcttaattatttgataaatcaatcaaagcggaatgatttctattagattagttatttgatgatataatagctatgtatttatcatttgaattataaaaagatataaaattcattttttataaaatatcaaaaacaaatttcttttggtgtatcattgataaaaatgattgatatgctattattaatttgtaggatgcaacttgtatttacaacttagaatttacctacactatttataattagtctctatcactaattataaaaagcatactggcaagattgccaatatgctttttattctaattgttattttttaatcttcttacgtatacgattcaatgttttaaatagccaatatttaggtttattaattggtttatagaagtctccaattaactcctcgatatacacattaaaccctcttttaaagcgataaacaccataatcttcactattttcagtgaaatcaccagataaaccataaaaattatatcgatcatatccatggtcaaagcaataattcatcataaaccaatgcatcatgtatggtcccatataattattgtatttttctgatgagccgcctgagaaatagtttacttcataagcatttgcaaagtatactccagaagctaagtttaaaatttgtccatcagtttgacgtaattcacttgcatgtaagagctctttttggtcatgttctatttgtttatctaattcagcaatttttttcagctgtttgtcacttttattgtctttagacatcatttgatcacgacgcgtttctttatcatttaaagaggtttgcaatgatttaatatagtcatctaaatcaatatatgctaatggcactaatgctttatcgccgtatgtatctataaaattataaaaatattcatctgtttttgaaacaaaaccggtacgtgcttctgtttcacgatacaagtctaagaaaatgtttagttcatctcttttaagaaatcttacttttactccatagtttatcgctttatttatatttcttttacgttgactatcaaactgctttttcaatgatgcaggtgtttcaccttttagataatttacacccatccatctcacttgactagagcgatcatatttcgtagtgaaaccatgatgttcgtaaccatgtgatttaaataaattaactaaagcatcatttttttcgtgaccttcaaccggattgatatctttatcataaatttgataaatccaatatggatcaagttttacatataaacattgatgttggtgtaggtatttttctaattctcttaggtaaaaatcaacaagacctaaatcggaataatccatcaccggtccacgatttgaatagtatacataacttcccatagttggaatttttgagaaaagacttgcagcaatcactttattactttcatcttttacgcctaataacacaacttcaaatccgtcattttctctagtttttatattttcagtaacttgaaagtaatgactctctaatgatggattttgtacgaaggtttcatattctttaactgttaactctgtaaatttcatattcgcactatccccctcttaattcaatctttttttaatttttttaagtgttgtatatagtgaatacattggtttatttataggtttaacgaaatcaccaacatattcaattacatctgcattaaatccttttttaaattttacaacacctgcatcttcagcatcatctgtaaaatgaccactaatcccataaaaattataacggtcaatgccatgatcaattgcataattaatcatagtccattgaactgcataacttccagcgaagtgtctatatttatttgacgttccacctgcataatatacaacttcaaatggattaataaagaagaatccagcagatattggtaattcgttaccatgttctaattgaagttgtgttgcttcatcaattttttgctcatttgcttttaattgctgttctaaatttatttttttattttgtgcttttttgttatctggtcgtttttcaatatcttttagagctttgtttaagtctttatttaatgtctgacgttctgcatgaagttcttcaagatattcatcaaattttatatatgcgagaggtactaatactctatctttaaaatgatcaaatcgattatagtaaaaactatcctctctatcagaaaattctttagtctctgatgtatcttccataaatgatctgaaaataggtaattcctctttagtaagaaatcttactttaacaccatttttttggacttttttagtatttctttttcgtaaactatccattccatttaatacatctttagcagttttatcctttaaatttaaaactgaatggaaccgaatttgtaatattggatcaaatcctgttgtaaaaccttcgtgttgatatcctaattgtttcattttatcgaagaaccaatcattcccagcatttcctgtaatatcaccatcatgattacgatattgataaggcaaataagggtctatacgtacatataaacaatgttgttgttttaaatatttacttaattcgttaaagaaaaagtgaacgagttctttgttttcataatcaatgactggaccacgatttgaataaaaatatttaaaaattttcataacgggtacagcagttagcatacaagcagcaatgacttcattatctttatttttaattcctactaaatgagtttcagttttctcagcaacttttaactcataattttcagtcatctgtgtaaaatggctatatggcattttttcagtaaaatcgccaaattctgtagatgttaaatttgtaaacttcattatctctataactcctaatttagaatctttatttaatttgagttgactaattttaaaattttagcttatgtatatgttgtgaatacgcatcggtctaatctcaataagtatacactagataaggttaaaactaaaatataaacctgtatacacttccaattaacctaaatgctcttaaattcttggcttctatcttctacaaataataagagctgaaaaagaatgattttcagctcttaaattcatatctaatttcattttaaatcaattaatactacattgctactaattcttaagtatttcatgctatgaatactttaaatagcttttattttatactatgctaatagttatttaaaatttgtctaatctcccttaagtattctcctgtttgatctaagtcatcattttcaaatcttcgaacgatttcacttccaataacaacaccatctacatcttttaccaaatcttttatatggtctgtagttcttattccaaatcctgctacaactggaagagctgtaaaagatttaatcatttttatctggtctttaagctttggatgaaacgttccatcttctcctgtagtagcattcatcgttacagtatagataaatccttcagcatgttttgctatattttgtatacgatttgtatctgccgtcattgctattaatgaaattatttttactactctattatcatttaattgttgttttaattgttctattaattcaaatggtaagtctggaataattactccataaacaccaatatcatcgcattttttaaaaaaggctttttctccataacttaaaataacattatagtatgtcattaggacatatttacaattaatttcgttttgatgtttatctaactcatcaaatatatagtcgattgttatatgattttgaagtgcttcatgaccagctttcataatgataggtccatcagctacaggatctgaaaatggaataccaatttctatcatatctgctccacttttatcaagtaattttacattttctaaaaattgtctattacccatgatataaggaataaataatttactcatttttgtcctcctttctttgttggatatattgttgaatcgtttccatatctttatctccacgtccagatattgtcactactaatatatcgttttgtttcatttgaggtgctaatttttctacataacttaatgcatgtgcactttctatagcggggataataccttctattttggtgaagcggacaagtgcttccattgcttcttcatcgctagcacattcataggttactcttccaatatcatgataatatgaatgttcaggtccaatacctgggtaatctaatcctgctgagatagaatgtgccaattcaatttgtccatgttcatcttggattaaatacatttttgatccatgaagcacgccagcctttcccttccctatcgcaagtgcatgttgattagtatccttacctctgccagctgcctccacaccgtataatttcacattatctttgataaaaggataaaatgttcctattgcattagatcctcctcctacacaagcaactactgcatctggcaaacgatgttccttctctaatagttgtgattttatttcttgaccaattacactctgaaaatctctaaccattgttggaaatggatccggtcctaaagctgatcctaatagataatgtgtatcctccacgtgacttacccaatactgtagcgctttattaactgcgtcagataaagttccttgaccttcatccacagcttcaactttagctcctaataattccattctacatacattcagttgttgccttttgatgtcttctcttcccataaaaacaatcaattccatatcaaataatgcagccactgtggcacttgcaactccgtgttgtccagctcccgtttctgcaacaagtttatgtttacccattcgtttagcgagcaatgcttgacctatggcattattgattttatgggcaccagtatgatttaaatcttctctttttaaataaattttagccccacctaatgtttctgtgtatgattgcgcataagtcaatggtgtttctctcccaacataatcctttaaataatatgctatctcttgttggaatttaggatcacttttggcttttttatacgctctctttaattcaatgatagctggcattaatgtttccggtacatattgtcctccgtactcaccaaaaaaacctagttcatttgcttcagtttgtatctgtttcatattctaagctccttttaacgtaatttataattgtttccattttcaatttatccttgcattcatttgtctctataccactggatatatcatagcctttatgtgataaatctagcttttcaatctgttgaatagcatttatgtttattcctcctgcaataagataaggaatgtcttggcttactgattctaatattttccaattaaacgtttgacccgtaccacccaattgaattgaaggagtatcaataataaataaatccacccatggcttatattgattaatatctctattcaaattttctgtagccggcaacgctttaattatcttaatattcttaaaattcaatttaactttttggattaattcaattgcttcattaccatgaaattgaatggcattcacattggtttgttgcaacaatgtatttaattctttatatgtaggattcacaacaactataactcgatgaatgtgctttgctacaaattgatttaaatagttaatttgttctatatttaaatgacgtttactttttggataatgaataaaacctatcatgtctatgtctaaggaattgacttttaaaatatcactttttgttttaaaaccacaaaattttagtatattcatttctctttatttagttttaatgaaggtaataacgatgatatattattactattcattaaagctcctcccacaagtaatccgtctattccactacttacaattttttttacatcatttaaagttgtaataccactttcagaaatatagtaataaccttcttttttcatttccaaaatgtcattagtatgttctactttagtaataaatgtttttaaatctctattatttactccaatgattttaggtttaatttgatatgcgcgttctaactcttctttgttatggacttcaactaagacttctaagttttgagacattgcataatgatataaagactgaagtgtatcattggttaaaatatttactattaataaaataatagaagctccagctctcttagcaagatcaatttgaagcggatcaatgataaaatccttacataatactggtaaatgtgtgagttgtgttaacgtttgtagacgttcaaaacttcctccaaaatatttttcatcggttaaaattgaaatagcatttgctccatgattttcatatttagcaatttgatgctctaagttaatgtccttgaatgcttttacagaaggacttttagattttatttctgcaataatactcaatgttgattctcttttcaaagtggtttctagagctgacttataagatacatcaacttttttaatatgttttattttatcagtataatacccatcacttagtaattgttttttatactgtacaatctcatctaatattgtcacttttattcccctttcatcaactgatattgttttaaggctttgccactatcaattaaatcttttgctaaatcaacgccctttttaatactatccactctatttgatatatataaggctaatgctgcattcagcactacgacatttcttttaggggaatgatcttttccacttaatatatcaatggtaatgtttttattttcttcaggtgtaccaccttgaagttctatattattcgcattagcaatgccgtaatctcgtgcatttaaaacataatgtgaaatagttccatcttcatgcaattcatatatttcgttatccccagataacgttgcttcatccattctattcgcgccatgaagtacgatacctcttcgtcgtcctaaatctttcatagttttaataatcatggataattgggaagcatcgtatacccccattacttgataatctaatttaaaaggattgattaatggtccgacaatattgaaaatagttggttcatgaatgagttttctaataggttgaatatatttcataattggataagattccatagcactgataaatgctaaatgcgttttagatacttgtttggctacattcgctactttcgtagtaggaatgtgtaattgttgtaataaatcggtacttccagaattagatgtaatgcttttatttccatgtttaatgactggaacatctgcacttgctactacaaatgatactgtcgttgaaatattgaaactatttgatttatctcctcctgttccacaaacacatatacttcctttgtattcaggttgagttgaatacatcgtatgaataagacttttcactatataagttaattctttttgttgtatcgacttatttgtgaaagcttgtaataactttactttatcttgagtatgacattctggattgatgagatattgaataaattcagtagtttcatgttgtgagagtgttacatggctttgaatttggttgagtaatgttaaggtcatcatatttacctctttcctttacgatatcgataaaatttttaattatttgttgtccttggtctgttgcaaacgactcgggatgatattgaataccaaaatgtaatccattttttgtttcataagattgaatgcaatcttttgttcttccagtaattattaattgtgatggaaaagagatttcatcacttattaatgaatggtaacgcattatattaaattgatttgctaagttgttatataatttagtttgttgaataactgttaatatatcgactttaccatgcatgactttttcaccttgaataacatggccaccgtaatagcatgttattgcttgtgcacctaaacatacgcccaatatcggtaaagatttatacctttcaataatatttaatagatggttactatctaaaggatgaccaggtcctggagatatgatgagaccatcactttggttaacgtaattaagcacatctttatcatctggatatttaacaatgatgtcgtctaattgacttactatatcaactaagttatatgtaaatgagtcataattatcaatgattaaaatcatggtgttacctccaataaactttttgcttttaataatgtttcttctaattctttttctggtactgaatcataaaccaccccacatcctgcttcgactttcacggtagtatcatcgattaacattgttcttattgctaaggcaaaatctaaattctgattgcaattaatgtagcctacaccaccactatataggccacgtttatatggatatgtctcatatatacgcctaattgctctaagttttggagctcctgaaacagttcctgtaggtaataaattagcaattactgtcataggagataattctcgcttaatctcacctcttacttcgcttacaatatgcatgacatgttcatatttttcaattttcattaattttgtaatttttgaactaccggttctactgactctatgtatatcatttctgcctagatcaacaagcattcgatgttcgcttaattccttttcatcactcaataattgctctgcattttgcttatcttcttttatggttttacctcttttaattgttccagcgattggattcgtaatgaccgtcccatcttgtacagctacaaaactctctggagaactgcctataataatttgtgtagtcatattaatatagtacatatatggacttggattacgtctttttaagttttggtataattgataacttaattgtaatgtattatttttaaaataatgattgtagctatatattctagatggtacaacttgaaacatatcgccttcttttataagttctttcaattgttttatagtatttataaattcatcatctgatacatttggcatgatatttgaaggcgtaggaggatgaatataatcatctgtataagctttaatttgagatagtgcctttactctattttttactctttcttctaaatctttctgttctacttctgagaattgatttgtagcaataacatataattcatctttataatgatcaaatacatatacatcttctatcatgtgaaattcaatatcattgctgtccttaatttcttgtatagattgctgttttaacattggaaattcatgtcttattaagtcaaaactacatgtaccaataaagccagatacaaatggtaaatgttttaatttttcatctgtaatctgaatattaaattgattgatataatcttttaagtattcataagacttttcagtaatttcaatattttgtttttttgtttttatcgttagtaagtcgttgtttaacacaacagaaccatagctttcgaatgctacaatagaatatctacctttaacttgtttttgactggtactttctaaaataattttatttttctttaactttcctaatacttcgggtgtaatattagctctaagtatttcataatatattttcattaagctttagtcctttctcaaaaaaatatcagcatccttatttaaaaggacgctgacgcgcggtaccaccttaattaactaaatattttgaattatcaaaatatttaaagttcactcatttttcatttaattttttataagtataaacccaattttattattagtgatgttagttttcatcaaccactaactttctatgattatctagctaataattactatatttataccaaaaagacaccacgattacgttccatagataaggacgcgttaccgtgatgccaccttaattaacattacatgttcactttactgttattaaatttaaccttctaagtccaattcaaacatatgctgtgctaatttacatcatccattagctttctatttgctacatcacatatcttctactcaattctcagaattattaaaatgttattataattcagtataatacataaataaatcttccttgtcaatatttatttcaatttattgatgacaagcaataggcatataataagttttgagcggcatgtatagaatcaatatgtgttcgttccagtgcatgagaggactcaataccagctccaaataacccatgtttaatatctgctcctgcttttaatgctgcagacgcatctgacgtataataaggataaatatctattttatacggaatatgattaaatttacataagtttactagatgtgtttttaattctttatgataaggtccagacgcatctttagcacaaatagatactgtatattcgtcagaagattgtccctctccaagcgctcccatatcaaaagcaataaattctacaattttattagaaatagatgcattcgctccatatcctatttcctcattattagaaatataaaattgaatagtatgtggtaatttaatttgttcattttttattctttctaataaatctaatatcattgctacacttgctttgtcgtctaaatgtcgggatttaataaatccagatgatgttatttctgttcttggatcaaagctaataaaattacctacttctattcctaaaccttctgtctcttgcttagaagtcgttttttcgtctatacggacttccatgtgttcaatatctcttgggattttttcattttcacgatatacatgaacacttgtttcatgtaaacatattgtccctgtgtatgtttcgccagagtctgtttcaatctgacaatattctccttcaatcgcattatatttaaatccaccaattagatcgattgttaaacgaccatcttctttaatttcttttaccattgcacctaaagtatctacatgagcagtaatacaacgttgacgctcattgtcttcaccctcaactgtgataattaaagcacctttatttgttaattgagttgaatatcctaaatgttctactttttgttttacataacttattgctttataagcatttcccgaaggactattaatgttagttaagttttgaattaattctaatatttttgattccattcaacttcctcctttaacaatttaaatatattttaacttagataaatagcgaactctaatgaatagtattgtttaaaatgaatgactcatttaaaatatagatattctgaatatttagaaataaggagggctcatatgaaaaatattttatttgttggtttaggattaatcggtggaagcttagctagtaatttaaaattttatcaacctgatcttataatttctgcctatgatactgatgtaactcaattagataaagcaatgtctattggtataattgataaaaagattaatgattatgcacttggtgttaaggaagcggatattattatctttgctaccccagttcaccaaacagcaatatatctaaattcattacctaattatgaaaccaaatcacatttgattgtaacggacacaggcagtacaaagcttatcattcaaaattttgaaaaacgtttattagaatcaaatattcatcttgttagcggacatccaatggctggtagccataaatctggtgtgcttaattctaaaaagcatttatttgaaaatgcatgctatattttagtttacgatgatgaacataatacacaagcagctaaaacattacaagacttgctctcccctacacaagctaaattcattgttactaatgcaaaagaacatgattacgtaacggggattgtcagtcatgttccacatattattgcctccagtttagtacacttgagttcaagccatgcaaaagatcatgctttagtcaaacagcttgctgctggtggatttagagatattacaagaattgcaagtagtaatgctgaaatgtggaaagatatcttacttagtaataaacaaaatatcattagtttactagaggatatgcaaactaatattaaggatatgatagttaaacttaaaaatgaagaagaacaacaaatatatcaattctttgacgaagcaaaaatatttagagaccaattacctcttaagcaacatggtgtagtgaatgttgggtatgatttatatattgatattccagataaaacgggtatgattaatgaagttacttctacacttagtttacataatatttctataagaaacttaaaaattttagaagttcgtgaggatattttaggtgctttacaagttacctttaaaactccaaaagatcgtgaattaggtattattgctttaaacgaatttgatacgtatattccataaaaatggaagtgggccaaaattcaaaatgagttttgacctacttccgttgttttacatcttatgacctgccatcaatcctaatctattatgttttgttccagatgcagtataagaaattgcttttgaaacaatgcctttgccatattttctttgtaacgtatcaatcgttttagctaaattttcatctctttgtcttttatattcatttacaaataaatttaattgtcgattttcttcatgaatgaactgtgttagtgaaacacttaacgtacgatacaaagcgtgtttatcacacaactgattcgcataatcattaacgactttaaatatatcttgttctagatttgtagcatcagttaaagtgtgttgtttatgtattcctccaccttcagtatatccaaatgaaaaatgtatagtacgtgctaattgctttctttctcttaatctacaagtaacatcttcaatcaactcttgcataacaatttttgcttctttaaattgatagtctctcatcaaaatttggcttttacatatagctggattattaattttacttttttctcttattttactttgatctataccgttagcatgtaaatgcatatcagtgcctaatataccaaagtctttcttcaaatatctatgaggataatgtgctaaatcacctattgtaataattccttttttatttaactttatttctgtttttttattaattccccaaaatgatttcaatggtgaaatacgccataatttatcgggtatgtcatgataccgccactcagtaataccttcttttatgtgtttagcttcgatatccatagctactttactaagtaacaagttagagccaatacctatcgtacagtatattcctgtcttatctaatactttcttttggaaacacttagcaaaagaatatactgtagtattaaaaagatgatagctatttgttacatccataaaaaattcatcaatactatactgatgtaaatcttcccttggaacatatttaagagcaattttagaaatttctaaagatatttctagatatcttctcatacttggattaataatataaatatcattatgctgtggaatttcaaataatctagatccagttttaattccaagttcttttaatttaggtgttgctgccaaaacaacagatccttgtcgcttagtgtcagctaccactgctaattttgtcgttaaaggatctaatcctttttcaatacaagacacactagcataaaaacttttctgatctacacataatatgtctctatcttcaagtaaattataatcatacatatcaagcccctccttagataattcgattatataagaacaaatgttctatatcaacattaaaaagaacaagtgttctattaaaaaatcttgaagttcattttttaaaaatgatatactaagcacatgattatgtaaggaggaaaatatcatgccaattgtaaatgtaaaattattagaaggacgctcagatgagcaattaaaaaacttagtcactgaggttacaaatgcagtggagaaaacaacaggagcaaatagagaagcaatccatgtagttattgatgaaatgaagaaaaaccactacggtgtagctggcataagaaaatcagagcaatagtattataacgatttaagtttacataataatattattgtagttaaaaagataagaaataagcaggccactttggcctacttatttcttatcgtctaaaaatgactctattgcttttttatttttctctttatcaatatctaatgcactaccatcgttattagtattgatattttgataagaattttttaacggtacagttagtgcttccacatttttatcgcctcgtattccaaaacttagtcctgtttggaaaatagctgagtttggcatatctgtgttaatatatcctcttaatataccggctactttaggtaatttcacgattgtacttggggtaatcaattctttcttaagtgtttgcataacttgttgttgtcgtctcacacgtccaaagtctccctctggatcatgtctaaatctagcataacctaataattctttaccgtttaatcgatggtgtcctttttttaatgaaactccaatattttctgacatatctttttcaacatcaattggcacaccattaggttctaactcatcaatcattttttcaaagccagtgaaatctatgactgcatagtattcagggttaatacctaaatttttatttagtgtttgtctcaacaactctggtccaccaagtgagtatgcagcgttaattttatatttatcataaccaggaatttccgcataaatatcacgcataattgacatcattttcatttttttcttaatatagtcatactgtacaaccataatagagtcagttcttgatttcccaccattagcttggtcagcaccgagcattaatactgtaattttcccgtcatttttaacggctccattaaatttatgaattttaatatcttttgcatgttcttgtgcatatttcataccactttgatatccatgaacgacatacgtaatcattacaataagtaaaactacaataatcagtattacaaaaggtaattttcgaaattttttcttcttgcgtcgtttagaaggtatcgttgtccccgtttgccgtcttaatattgtattatccttctcttctgtcatatttacctaccttacactctttaaaatcttcaaaataatattcggatatactataatatataaataagttatataaaataccttaaaaaatcaagtgttttcaataaatattacaaaggtgttaggaaaggatggcataaatgaatattaatacagcatactttgcaggaggctgtttctggtgtatgacaaaaccgtttgatcaatttgaaggtattgaatcagtaacatcaggttttatggggggatcagttaaaaatccaacctatgaacaagtaaaaagcggaactactggacactatgaaactgttaaaatagagtatgatgttgctttattttcttatcataaattattagaaatatttttttcagtcattgatccattagatgctggcggtcaatttcaagatagagggtcacagtatcaaacagctattttttatacaaatgatgatcaaagaaaagttgcgattaattatatcaaagatttagaacaaacgatgcattctgataaagccattgctactaaggttcttcccgcttcaaatttttataaagcagaagaatatcatcaaaatttctataaaaaaaatcctgaacgttacgcacaagaacagcgagatcgcgcaaattatgatcctcgttctaactcataaataaaaaagatatccgaaaacaatttcggatatcttttttatttatgtctaatcactcgcattacttttaacatactgtaccatagagaactatcttttctatataccaaaaatcgcggttcccactgaggactatatttttctttatatcttcgtaatccctgaaaacgatataaaccattaaaatgttcaaacacacgtcccgcaatacgttctcgtaaataagaataatcgagttgacctacatttgataaggtagccatacccatgttaaaagctttataccctttttctttaccccataataacatatgtagatataatccatccattagaggtaaatctaattcaggtaaccaacgaattaaatctactgaaattgcttcgttatagtatgttggcattaatgtacaaaaagcaataatcttaccttcttcatttttcataattccaattggcgctttatctaagtactgttctgtaaattgaccaacagaaaaatgcatttcagtacgtccatcgagccacttatcacttacttttctaagctcttctataaacgctttagaaaatggtggttctataatttcaaatttaatatttaaatcattaaatttattcagtgttgctctaaaaccacgtcgtttttttccagaagtagtaaattgtgttaaatcaataatagcctcttcgcctaatttaaaaaattgatttccaaaattatgatacaacggcataaaacgatcagatacttgatagaaaatgacatcataacctaacttttcagcataactatagaaatcatccaacaatgattggaatgatgctgtatttccaattggatctcccaatacgaccagcgcatttgatttatatctatacataagaaaggcttgttcactgtcatgcataaatacatctttatcaccactatatatcaaatgacttaaataattccctccatatgtttctataattgatttacattgagaaaattcttggaattgatgtgggcgttcaaagcgacgaccaaataaccatgcaataccaacaattaataatataacaactaccacagttaaccagaaatagtattttaataatgacgtatccatttccaagtgatataaatctaaagcatataaggtttcagaaataatgaaatgattaatatataaaacaatcacactaatgactaaggtaaatattaagttttttaatctaaatggacgtttaaatactttcgcacgtcgataagctaaaataagtaagataaaaataatgatgagccatgtaagtaacatgatagaagcatacgtatataacgttgcaagaaatattaaaacaagtgaaatcattgaataaataattgctctcttactttgcttatatattccccttacattaacaagtaatattaaacatgcacttgtatgaatagacaacatgatatagtaaataaaatgatctgcatcatataatccatcatacacaatcgtcacattattaataaagaaaataaaacttgttaatagtccgagaatagataaagcaaatgctgggatttttgaaataatatctttttgataagacagtatgaatgaggtaatatctttagcgggtacaaaatatttagactcttcaaagtacttacgcgcagaattgccaaattcaaacgtagatagaattaaagcaataataacaggtacaaaataataagcaaaacgatataacagtaaggcaatcaatattttttcttcaggaatatctaaggattttagtcctaataaaacaactaaatcaaatgctccaaatccacctggaataaaactaattagtccagataatgcagcaataataaaaataccaagtaatgttgtaaaagctacatgaatatcaataatccatgccgacaagtaaagtacaacagcagcggctatccattcaatacttgaaacaagcgtgcaatatattcctaccaatttattatgttcagtaaccggtttaacgactgtatacactataaaaataggtaaaaataaagcgactacgtacaatacccattttacaaaacgtactttatcaagaatatgagaagcatcgaaaatatgaagtacgactaaaatagataagaagcttaaaccagttaacattgaaactaatatgattgaaatagcgtgaagtaatctttttctatcagaagtataatttttataaataaatgttctaaatcctgcgcctataaatccaccaaatccaacaatagcattaaatgcattaataatataactcaaacgaaatactttgttcagtggtatactcaactttaaagttttaacaagaatgacatcatataaacttaaaagtagcattgatgcgccaccacatataaataaaccaattaaaaaccatcgattgattttactaaatgcttctaatgtttgtttgaagttaatatgtgacaattcatgatataaagtagcaactactacaataaaaagtgtgacagcaaataccacttttaatatagatatcaatctatttttatgttcttcagtcattattcattattatcctttacattatattaatataaaatatatcatatcatattctaggtatatatctttagactattgaactaacataattgtaagataaaaggtagtggaggagaattcatcgctctactttacaacgatgactatcactatattaaaaagcccgagacaactcattatgtctcaggctttttaatatagtgatttattctgcttctgtgtaatttttatgttcttcttttttaatctcatattgacctgcatcgtcaccatagtatttattgtaacgacgtttaaataataagaagatatgagaaactaatacttttaaaatagcgtagccaggaatacctaaaataactcctacaatacctaacaaattacccgcacttaataaaataaagataattgttagcggatgaatttttaacgtttttcccataatattaggagaaataaaatgaccttcaataaattgaaccaacgtccacacaataatcaattttaataacataaatggtgaagtaataatcgcaataataattgccggagaaattgcaattgttggtcctaagtatgggactacgctcgttactgcagcaattgaagctagaactaatccataatctaaaccaataatagaataaccaataaacaataaaataccaatacaaaatgatacgataatttggccttgaatatatgagccgacctgtacactcattttttctaataaatcatgatagtcttttctaaatttaggcggcacaattttagttgtataatctctaaatttagttccatctttcaacataaagaataatacaaatggagtagttgcaatcacaacaccaacattcacaacagcttctgcaaatgttctaattttagttccaaatccactaaaataatctgacgttaacgatggaatctttttagaagtagaatcaagccagtcctgaatttgattataaaatgaagataaaatagacatatgtgtcactttatcaatagctctattaaatttttcaatatattttgggaagttatttgcaagttgtttaatttgatcaccaatcacaggaattaataaatcgataattaatgttgcgcctccaataatcactagaaagactattgtaattgctaataatcttggaatattataccgttccatcaaattaatcactggatttaacaaataatacaaaataagcgataaaataattggcgctgcaatagtattaaagataatgacaaaaggctgaaaaacataagaaattttgtcaaagatgaatatagtaataccaagtaatactaatgaaaatagcgcaaataataaatctttaccacctagaaacttcataaagcgtgtttcagaaaagcttagcttattagctttctttccttcaactttattgtggtccattgacatatcattttcaccgtaccttttaatctaaaataaaataatctatattatatcataccatgtagcttattcattttgtgtgttattttgagattgaaaatgataaatatgcaaagctaaataaacaatttctgaatcatctacatcaatatctagatttttttgaataactttagaaatcttatatgctgtactgtaacaattagggtaatatgttttgaccatattgataaattcatcttgtgcatgaacatattcctttttatttaaacgacgaattagaaattgaatatgtctaataaatcgttgatattggaccgttcgaggatttacaggataccctatatcattttcgataattaatacacatttacttatcattttattaattaaagatatttcactcataggtaaatcttctttatttgacgcaatatgcaatgctataaaacctatttcatcctcaggaaatgtgacatctaatttttcatttaatctctgtataacttgtgtggcaatatcatacgcctcactatataaatgtttagtttccattgcaaagggattactaattatttgattttgttttaagcgtttatatgcaaaaataatatgatcggttaaggcaataactagttgtttatcatcgttcatatagattgtacttgtaatatagttaactgattcaataattgcttgtaagacctcttcatcagctatttcaactagagatttgtaatactcttgttgttgtttttgatctaatttatacactttctcaatagaagcattatcatttacgaccattccaggctttttattaaaaccaatacctttaccaattaaaataacttcttgattactattgatgcatatgatgacgttattatttaaaatttttgaaatatgatatttactcatcattatcatcctttttttactattaaaattatatagttaaacattatatttgaaaagtcgtccttttaaaaaacacttctttctcgcattactctaaaagatggagaaaagaagtgttgatttaaattattaatgttttttagatattttatcttcacgtccccaagattcaataccaaataaattaatctcaaggttttctggtttaaatacaggttttaaaccagcacgtttttgttgaatgtaatctttcataacagcaaatgcaatatttgaaagacctataatggaaacaaggtttacaatggccattaatcccataaataagtccgctgtactccatacggtttcagttttaacaactgctcctgtaaatactaatacaacaactaagcatctaaaaataaataaaattgctttgtttttagatagaaattctatattagattgtccgtaatagtaattaccaactacagaagaaaatgcaaatagagtaatcgcgacagttaagaaaataccgcccggagaaccaagatgttcattcaatgcagattgtgtaacttctacaccttgtggcgctttttcaccaaattttaagcctgagtaaagtaaaatcataatagctgttgctgtacaaacaagcattgtatcgaagaagacacctaaagattgaagtaatccctgttttactggatgtggtacagcagcagtagcagccgcattgggggctgaacccatacctgcttcgttagagaataagccacgttttacaccttgtaaaatcgctgtacctactgcgccacctgcgacttgttccattccgaatgcacttttaataattgtaccaatcattggaataatttgatcaaaattcattagtaagataactaaaacaataccaacataaacgatagccattattggaacaattaaagatgataacgttgcaatactacgtacaccgccgaagataatgattgctgtaatgacagccaaaataataccagtaatgactggactaatatgatattgggttcttaaagattcagcaatagtattcgattgaactgtgttaaatacaaatgcaaatgtaacagtaattaacacagcaaatgtaataccaagccatttttgatttaaacctttggttatgtaataagctggacctcctcggaagccaccatctttatcatgaactttgtaaacttgtgcaagtgttgcttctacaaatgcactcgcagctccgataaatgcgataatccacatccaaaaaactgccccagggccacctaacacaatcgctgttgctacaccagcaatatttcctgttccaacacgagaacctgcactaatagcaaatgcttgaaaaggtgaaatacctttctctccatttttcagagtttctggtttttcgactaatgccttaaacatttcaggtagcattcgtagctgaacaaatttagaactaatagtaaagaagatacctactgtcaatagtaaacctattaaatactgtgaccagattaaatcatttccaacttggacgacggatttaaaccaatcaggtattaaactatcaaaatctctcaattaaatccctctcatcaaaattattgttatgatatacattacaagagatttatattgtagtattaaagatcaaaatgtacatatttctcatgtaatcactttgatatacttaccaacaatataaatctcttgtgagttataaataattaaatattaaattaattttatcatcttatgaattacttgaaaacaaaaattttaaaatcatattaatttattatcattgattttacatttccaaattcatttgtatcaaccacaaatgaaccatttgtatattgttcagaaagatgaatacgagaaatttcacctgtttcagcatgtttatctgaataaagtgtatagtatgtttcatctctgacaacatgtgcagctacaatacgatgaggattttttttcaattcttttaaaagtgtaatacctctttgtgcgcgtttggcatcttgtaagatatctttagcaatacgttttattgctcctctttgcgtagccataatgattgaattattcttatcaacagtatcagtcataataacgtaatcttcatcttttaaattgatagatttcacaccagccgctcttaatcctgtatctgaaagttcttctgtagaatacgttaatgacatgcctttatgtgtaataacagtaatcatttgttcttgagttatgcgaagtacatttaccacttcatcttcattttttaactttgttgcaatgagtggcttattaaatcgcgtggttttaaataatgattgattactttttttaatcatgccattacgagttgcaataatataaaaagctttaccatcaaatgttttttcgttaaatacatctataattctctcgttttcttctaaagacacaatttgcgatacatgctgacctaactctttccatcgcacatctgcaattttatgaattggaataaagagatatcttcctttattcgtaaatactaaagctgtatcttgagtatttacagtttggtatttgagtaaactatctccctcttttaaacctacttctgtcacaccacttgcattaaagctacgtgtagacgtacgttttatatatccatgtctagtcatacttaaaacaacttcttcacttggtacaataacttctttatcaattttaatttctgatatttccgcttcaattgaagataaacgtgatgttttaaaacgttttcgaatctctgtaagctcttttttaataacatttaataatgcgtcatgattatcaagaatatttcggtactcttctattaatgtttgtaattcttcatgttcttcttcaagtgcaacaatatcagtattagttaaacgatataattgaagcattacaatggcttctgcttgtgcttcagtaaagtcaaattcttttactaaattatcttttgcatcttttttatttttagaatgacgaattagcgcgatcacttcatctaatatagataaagctttcataagaccttctacaatatgcatacgcttttcagcatgatttaagtcatatgtggtacgattagctacaacttcaatttgatggtttaaatagctgtcaataatttcacgtagacccattaattttggacgtccatcactaatagcgaccatattgaaattataagtaatttgtaaatcagagtttttatataaatagtttttaatagactctgaattaacatctttttttaattcaatagcaattcttaaacctgtacgatctgtttcatcacgtacttcaataataccatctacttttttatcagcacgaagctcatcaatacgtttcacaagtgaatttttattcacttcataaggaatttctgtcacaattaattgtttacgtccatttcttaacgcttcttcctctacttttgaacgaacaacaatttttccttttcctgtttcataggctttctttataccatcaatgccttgaataataccgcccgttggaaaatcaggacctttaatatatttcattaattgatttactgaaatattaggatgatcaatatattttaatgttgcttgaattacttcatctaaattatgtggaggaatatcagtagcatatcctgccgaaataccagtcgaaccgtttactagtaaatttggaaatcttgctggtaacaccataggttcaagtgttgtgtcatcatagtttggtacaaaggacactgtttctttattaatgtcacgaaccaactcttcagaaagttgacttaatttcgcttctgtataacgcatcgcagcaggtggatcattatcaatactaccattatttccatgcatttcgattaatacatgacgcaacttccaatcttggcttaaacgtaccattgcatcataaactgaagaatcaccatgtggatgatattgaccaataacatccccaactgttttcgcacttttacggaaatttttatcatacgtattgccactgctatacatagcaaataaaattctacgttgtacaggttttaaaccatcacgcacatctggtaacgcacgttcttgaataatatatttactatatcttccaaagcgatcgccaataacatcttcaagtgataggtcttgaattatctcactcaattgacttcctcctcatcatcttcttcagtatctagtatttgaacttttgtattatctaaaatactttgatcttcttgcatgccaaattcaacatgattttcaatccattcacgtcttggtgcaactttatctcccattaatgttgttacacgtttagaagaacgtacttcatcatcgatttgaactctaatcaacgttcttgtctcaggattcattgtagtttcccacaattgttcaggattcatttcacctaaacctttatagcgttgtaaaataaaacctttacctaattgtttttgaagtttttccaattcatcatctgtccaagcatattctacttttttagatttccctttacctttttctaatttatataacggaggtaatgcaataaaaacacgacctgcttgaacaagaggtctcatatatttgaagaaaaatgttaataataacacttgaatatgggcgccatctgtatcagcgtcagtcataataataactctattataattactatcttctaatttaaaatcattaccaacaccagcaccaatggtatgaataattgtattgatttcttcatttttgaaaatatcttcaagttttgctttttcagtattaatcactttacctcgtaaaggtaaaatagcctggaattttctgtctctcccaagtttagctgatccccctgctgaatcaccttcgacaagatataattcatttttctcagtattcttactttgagcaggcgttaactttcctgataataatgtatctttacgtttgtttttcttaccagaacgtgcatcttcccgtgccttacgagccgcttctcttgcctgttgcgctttaatagctttcttcacaagtgatttagataattgccctttttcctctaagtaataaggtaatttttcagaaacaacagaatctactgcactacgcgcttcagatgtaccaagcttagatttagtttgtccctcaaattgcagtaattcttctggaatacgtacagaaatcactgctgttaatccttctctaatatcattaccatctaagtttttatctttatctttaagttcattgatacgacgtgcatagtcattaaatacgcgtgtcattgctgttttaaatcctacttcatgagttccgccatcttttgtacgtacattattaacaaaacttaatatactttcagaatattgatcattatattgaaaagcaacatctacttcgattccatttgcagcacctgtaaacgtcgtaacatcatgtaatacttctttaccttcattgatataacttacaaattctttaataccttcttcgtaatgataaacatcttcacgttcttttccatcacgtagatctttcaaagtaatttttaagttttttaataagaatgcagattcttgtaagcgctcacttaatgtatcaaaattaaatgacgttgttgctttaaaaatacttgagtctggtttaaatgtaacttttgtacctgttttcttagtttttcccgctttcattaaaccagaagttggaataccaccgtctttaaaagattgcttataaatttgtccatctcgatgaatttcaacttctagccattcacttaaagcattaactacggaagcaccaacaccatgaagtcctccagaagttttatatcccccttgtccaaatttacctccagcatgtaatacagtaaaaataacttctacagtaggtttaccagacgcatgcataccagttggcatacctcttccattatcttccactgaaatactattatcttcattgattgttacatcaatttcattaccataaccatttaaaacttcatcgacggagttatcgacaatttcatatactaaatggtgtaatccacgtttatcagtcgacccaatatacattcctggacgttttctaactgcttcaagtccttctaatacttgaatcgaatcatctgaataatgatttgtcatttttgttgccaatgcgttcgcctcctacaaacgtacgttcgtttttttaactttacaatagttattcttatataaaacgcattaaaatgcaagtatgagttatataagatacgtatttaacttaatatataagacgttttttcaatttttaatcgttgtcaggaatactttgtgataaaatatacctacattatataagggatgtgtaaacaaatgatgatgatagttctcatgttgattttaagctatctcattggagctattccaaatggttatgttataggaaaagttttttttaaaaaagatattagagaatttggaagcggtaataccggtgccacaaatagttttagagttttaggaaaactagctggatttatcgttacttttttagatatatttaaaggattcattactgtatttttcccattatggctcccagtgcatgcgcatggaccaattagtacattcttcacacatggattaattgtcggtatttttgcaataattggtcatgtttaccctatttatcttaaatttaaagggggtaaagctgtagccacaagtgccggagttgtgttaggagttaatccaatcttacttttaatcttagcagtcatattctttggaattttatatttaacaaagtatgtgtcattatctagtattattgcggcaatcagctgtgtgataggttcattagttattcatgattacatattatttggaatgagtgcttttgtatcaatcattttaatttttagacaccgttctaatattgttagaatttttaaaggtgaagagccaaaaatcaaatggatgtaaaatggatgtttcttgcaccaaatgtgaagattcggatttagttctattaattaaatatgataagcagttcatgtttaatagtgagaacaatatgttttagttcaagcaattattacattataaatataataataattaatataaaggatgggtcatataatgaaaatcaaattgactgatgaagcagttgaatggtttaaaaatgaattagatttacctgaagagaataaagtcttacaattttatgtgaggtatggtggagaatttcaacttaaacaaggttttagcccagcatttcgtgtggaaccgagcaatgacgttgagataggttatcatgaaaactataatgatttaattattgtagtttcagaagatgacttatggtattttgaagatcatgaagttctagttgaaaaagtagaccatgaagacgaaattgtttattctacaactaattaaaaaaagaccataagtatctaatatttacagatatttatggtcttatatttatatattcaaatcgctgcgttgtgtgatttctaattccttaccttcgttattcaatgcttcgactttactatatacctgatgccattctggaaaataacgatctaaacgaattggtctgaaatcacttgctttaatacataatagctgcgtggaccctgtagtagctaattcacctttttcattatatacttcataacagtacgttgaacgcaatcttgaataatgttctacccatgttttcactttaactttttcaggataaaaaatggatttcttatattgaacttgtaaatccacgacgggtgagataattccttctttttccatatctgcataactaaaacctaatttacgaatataatcagtacgagcaacttcaaaccatgtagcataattcccatgataaattactcccattttatctgtctcttggtatctcgcttcaatttcagtcatactataaatcatatttatgtacctctttccaattaagttcactttcaatattaacataaaaaagttacttgctatagaattccccatttactacttctactattgaaatagctcaatgacacaaatgaagaaaaaatccttagatgagattgccatctaaggattcaaaatacattcaaattttaaatattttttcgaataattgtattattgagcaagtttatttcttaataccatttgtagaatgccaccgtgacgataatagtcgatttcaacttgtgaatcgaaacgaacaatgacatcaaaatcaaccacttctccactttctttttttgcatgaactttaataatatcatgtggttgtacatcttcgttaatatctacagaaatctcttctctaccatttagaccaagtgaatcagctgattctccatctttaaattgtaatggtaatacacccatcataactaagttagaacggtgaatacgttcataactttgtgctattacagttttaacgcctaataaattagtacctttagcagcccagtcacgtgaagatcccataccataatcgttgcctgctaatactgctaagccagtgccatcttctttatatttcattgcagcatcataaattggcataatttcatcagttggccaatatgttgtaaagccaccttctgtacctggtgctaattggtttttaattctaatattcgcaaatgtaccacgcaccataacttcatggttaccacgacgagaaccatatgagttaaaatcacgaataggtacgtcatgatttaataagtatttacctgctggtgtatctttaccaatagcacctgctggagaaatgtggtcagttgtaactgagtcaccaaatttacccattacacgtaaatcttttaatggttcaatggtacctggtttttttgataaaccttggaagaatgttggattttgaatatatgttgaattaggatcgaagtcatataatggagagtcagtaacatcaatctcattccacatttcattattgttgtatacatttttatattcttctttaaataattcaggtgttacaacactatctactgtatcagcaacttctttaattgaaggccaaatatcatttaagtatacatcttgaccatctttagctttaccaagtggttcattttgtaaatcaatatcaactgtaccagctaaagcatacgcaacgactaattgaggtgaagcaagatagttcgcttttactaatggatgaattcgaccttcaaagttacggttaccagataatacagaagtaactaataaatcttctttagcaatagctttttcaatttctggcaatagcggtccagagttaccaatacaagttgtacatccataacctactagattaaatcctaaatcatcaagatatttttgtaatcccgaatcacgtaagtaacctgtcactacttttgaacctggtgctagtgatgttttaacatattcaggcacttttaatcctttttcaactgcttttttcgcaactaaaccagcacctaacataacgtaaggatttgatgtgtttgtacatgaagtaatcgctgcaattgcaatgtctcctgttttcatagttgtttcagagccatcgttaaattgaatatgggctgatttatcaaattcgctttgatccaaaccatgaccttgatttccagcaggagctgttacagatttttcgaattcttttttcatatcacttaagaaaattaaatcttgaggacgtttaggaccagatagtgaagcttcaactgtcgataaatctaaattaattacatctgtatattgtggatcttccttatctgatgtaaagaacatattgttttgttgtaaataagctttaactaactcaacatgctcttcagagcgaccagttaatttcatatatttaagtgactcttcatcaactgggaagaaaccacatgttgcaccatattcaggcgccatgttagcaatagtcgctcgatcagctaatggtaaatcggcaacaccaggaccaaagaattctataaatttaccaactacaccttttttacgtagctcttgagttactcgtaatgctaagtcagtggcagttgatccttgaggtaatgaattagttaagcgtactccaatcacttcaggaattgggaaatatgatggttgaccaagcatacctgcttcagcttcaataccaccaacaccccagcctaatacaccaataccatttatcatagtagtatgtgaatctgtaccaacaagtgtatctgggaaagcagtttgttcaccgtccacgtctcttacatgaactaccttagctaaatattctaagttaacttggtgtacgatacctgttgcaggcggtacagcattataattattaaatgcttttgtagcccagtttaaaaattgataacgttcatagtttctttcaaattctaatttcatattgcgttctaacgcacgtgggtttgcatagctatctacttgtacagagtgatcgatgactaaatcaaccggtacttctggattaattttattaatatctccacctacatcattcatagctttacgtaatgaagctaagtcgacaaccgcaggcacccctgtaaaatcttgtaagattacgcgagaaggtttgaaaggtacttctccttcattaccttctttaccaaaatgggctaatgctttaatatgatcatctgtaataacaaagtcatcttcttgtcttaatactgattctagtagaacacgaatagaataaggtaacttactaattttagttaaaccttgttcttcaagactttttaaatcataatatgtatatgatttacctcgaacttcaaatgatttttttgcttgttctttaatgttagaagccatttgattatcccccttgaatattaaaaattcataattatacttctttaattaaattgtataattatatgttttttaaaacaactatatatcactagaatttgagtgatttgaattttggttttataatcagttaatataagaaatacttatcatagtacatttaaactataagtattttttattaaatgagaatttttttcaataagctaaatgaaataaaaaggaaagtagaatagaaattcattttgaatttttggctccaatatcaacatatattggatgtggattttcttttgaaagtctttatatttcgatctaaccatattaaaaaacgcctaagacaaataagttgtcttaggcgttttttttaattattgttctgctttctctgcattacgtcgattttgacgtttttctaatatatcagattcatagtctttttgttgatattcaatatattcttttagtctatgtttattaggctgtaatgttaatcctaagaatttgcgttcttggttagcatctttatagaaactaatcatcattagtatgaccacaaaggagaatggtaatgcactaataattgcagcactttgtagtgcgcctaatgcttctgcgccatctccaccacctgctaagagtaagatgaaggcaataagagattgtgcaataccccatgttacttttaccacgttagatggttctaatgagccatatgttgtttgcatacctaatacaaatgttgctgaatcggctgatgtaataaagaatgaaccgattaatacaagtgcaacaagtgataaaaccattcctaaaggtaaatgattaaatacgccaaagagttgtgtttctgctgacatcttgaatagctcagaatgttttttacccatttcaatacctaatacgccaaatacactgaaccataagaaacttattagagctggaacaagtaatacacctgaaataaattcacgaattgaacgtcctttagacacacgcgcaataaatacacctacgaatgggctccagcttaaccaccagccccaataatatagtgtccaagaagacatccattctcttttttgagaatttaatgctgctgtatcaaaactgttgaataagaatgtattgaacaaactaccaattgaacttgtaaacatgttcaaaattaatacagtcggtccaacaattaaagcaacaatcattaatattgtacctaaaccaatattggcattacttaaatattgaattcctttacttagaccagaccaagcactaataataaataaaattgtaacaacaacaataataagtgattgaacccatacattatttgggacgccaaataagtaatttaaaccaccgttaatttgtaatgcacccatacctaatgatacagctacccctactactgtagcgaatactgaaagtacatcaataatcgtaccaataggtccttctactttatctccaagcaatgggcgtaatgttctagaaacaagtcctggttcatcttttctaaattgagcgtatgctaaggcaagagctacgacaccataaactgcccaagcatgaaatccccaatggaagaaagtagaacgaagtgattcagtaaaggcttctgtcgtttttggactagcagttggtggtgctgcgaagtgtgacataggttctgctgcaccatagaatactaaaccaatacccatacctgcactaaatagcatggcaaaccatgaaatcgtattaaactctggtttatcatcaggtttgccaagttttaatttcccaattggactgaaaatcaaaaagacacagaagaaaacaataatagttgtaagtattaaataataccaaccaagtttatcagtaatccatccacttattgaactagtaattgaatcgaattgttccggtacaattgccccaattaatacaataatcgctacgataatcgcactataaataaataccggcgaaaatttctttcctttcttacttgattcagaagaagaattcataactaatataactcccttcatcgtaatattaaattttttcaaaatgaaaaatacacaattaattataaaaataattaattaatttttcggtaaaccactttaatataataacaaacgttttaatcttaatcaaatttcattaattttaatatttactaatttatttatgttttgtatgatatattatataaaaattaaataaataggagattactatgctaaaagaatttaaagagtttgcatttaaaggaaatgttttagatttagcaattgctgtagttataggagcagcatttaataaaattgtatcatccttagtaacttatattatcatgccattgattggtaaactgttcggttcggtagattttgctaaagattggcaactttggggcattaagtatggtcttttcattcagtcaattattgattttattattgttgcttttgcattatttatctttgttaagattgccaatacaattatgagaaaagaagaaccagaagaagaaattgatacaaatacggtattacttacagaaattcgagatcttttaaaaacaaataaataaatccaaagagtccgggacataaagtttctagataagtgaaaaaagacaatttctattgaaataatatagaaattgtcttttttataatttttttgattattttcagctcgtcgagctgctacttttcttatattaagtgccattaatacaaattctagttctcttttgactttatttatccctcaaatggacattcgagtgaaacccaaaatagccttcataaatccaaaaataggcgccacgtcaatttttccttgactgtagatggtttttgtttttgcttctgaaagcttttgattaatttgggctttaaaatattcccaattataatttttcattatttttttatttgtttttgaattgaatttcatccattggtgcttcaaagaacattctgaacaatcatcacattcatataatttaaagtcccgtttaaaaccatatttatcatgacgataggcatatcttttaaaacctaatcgctttttgtttggacaaatgtattcatcgttaatttcgtcataatcccaattttgagtattaaagatgtcactttatactttttagttttatcttttatcaacataccgtaagttataagcgatgttcgattaaaatcatctataattgccatataattgggttcgctaccataacctgcgtcagctacgatatattcaggtaaatgaccgtaggtctcttgaattgaatttaaaaatggtatcatcgttcttgtatcagtaagattttgatacacatgataagataaaacgaattgagaatttgtcgctatttgtaaatgataacctggcttgagttgtccatttttcatataatctcctttcattctcataaatgtggcctcatgatctgttttagaataaatatttctatgctttaaaataaatttttagccttcgtatttatgctttcgctcagagtaattattaatttgctttttatattttttaattttagttcttttgagccgtatttgttttcttattttagtccatttttcattatcgatatgttggtttaaatcttcgatttctttatcgaaatgactaccaatcaaatctatttctttttttgttaagtcattatcgcgatcttctttaatctcagttatgattttatttgtcacccattcatgatagagcactttagaatcttcattcttccttgactcatggttttgaatactcttttttcatacaaatgtatatcgattggcattcgcctcaactttcgtaccatcaataaaaatgacctgttcatctataagatgttgtttcaaacactgactatgaaattgaataaataatgattctaataaagcatctacttttggattgactctaaatcgattaatcattttataagaaggattttgattttgtgatagccacatcattcggatgctatcattaagtcatttttctatcttacgtcctgaaaacacagattgtgtgtaggcatatagaatgacttttaacatcatttttggatggtatgatgttgcaccacgatgatgtctgaatttatcaaattcagtcttaggaatggtttctacaatatcattgacatgtcgtgaaatatcatttgtggggataagaattgaagtttccattggtagagtaagttgagtcatgttataatctttatacataaggcacctcgttaatttagtttattagtgtttattaaattatacgaaagggtcttatttttttgaagtatttcaatgtaaaattacatataaatacagagtgttttggcgagactcttgagggaacaggacaagctgaagactacaggctgaagctgtcccctaagaaagcgagccaacaatacgtagtattgtaaataaagaagccagtaaatgaatttataaaaaactcatttactggctattttttaggaattatgtcccagcctcttttgttatttccatttaaattttgtgtaactttgatactgatttgtatttacttcaagtattaatggaattcgttgttttaattcactcacatgagagataattcctaccatccgtccagatgtttttaaatttaataatgtatcaagagatgtttctaaagtttcttgatcaagtgtgccgaatccttcatcgataaacattgattctaacgtaatacctccagattcttgttgtacgacttcacttaatcctaatgctagagccagggatgcttgaaacgtttctccccctgataatgaactaatatgtcttgacttattagaatataaatcaaatacatcgatttctaatccactatatccttgtgatattgattctcttcgtttaagttggtatcttcgcccgctcattatatctaatctaatatttgcttgatgtataattctttctaaataataaattaatacatagttttcaagcgataatttttgatgattctttccagataaaacctcagataaattaaaaatttgttgctgctcttttaactcttcatctaaatagtgaatatgtttttctatttttgcaaatttttcatcattcttcttaattttatattgtattgatacaacatcattaacatactgattatatttttcttcgatatgttctttttgcatttcaagattagatatatcttcaagttctttttcacttgtaaggcgtgttaatcgttctatttcaacgttatatttatgttgttccttatcgaattgattaactcttttctcaatatgttctttattttgaagttcctgctttaatttttttatttcatcttcattttctaaacctaatcgtttcatttcttttcggatagttgttgcaaaataatctaattctttttgtagttctttactcgtagctaaataattatcaacactattattttctaaagctagcgcattttgatatgattgcatgtttttattagtatcattaacatgttgatgatattcatcaatctcttttcgaagacttaagtaataatttttaaaagtttcaatacttgaatatcctgtatttatttcaaaatcttgaattaaagtttgattctgacgtttttgagaagctaatttctctaatttaagttcttgctgatgcttctcttgctgtaacgtatgaaatttttgttgtaatttatctaactcttctaattgttgttgtaattgtattttttcagactttgcactttgtaacttttctttgatttggtctaaattaatcgatttatactctatctctcctaaatctgatatgctttgagagagtaattcacacgtcgcttcgcttttacttaaatgctgttttttttcattaatttcattagaaagtttatcaagtaattgatgattttgattaatagtttcgaaatcaatatgctgatttaaagattcaatttcatttccacatattggacatgtatcgccaatacgtaacgctgactgtatttcaataataaaggtttgtttatcatttaaatcaatattacgtttatcaatgattcctaactgttgattgagtgtatcaatgtcattttttaaattttgtacctcttttgaatgttgatgatattgtcgttttagggaaacttgcttttcatacttatcttttaaattctgttgttcatctaattgtttttgtaattgatatatttgttcagtcagctcatcaatagctttattatccactttatagctatcaatagatttactcattttatgttctttattaattaactgctcttgctctttcatcatttcattataactgtgaataatatgttcttgctctttaaacgcttgttgatatttattcaaataattataaaagggctttgattgttctaaactctcactttttaaatgatatgagtcactcatcttgtctaattgtttacgttctttttcaagcatgtttattttattatttaattgcgatattttattttcagtttctattattttggtttttattgtttgacgtttttcttctttaaagtgttgttgatcatataaattaaacagcatgccagcatcatttaatcgatttaattttacttttaatgcatttatgtcatccatttgttcatctaactgatgttttaattgatgatattctttcagttcactcagttgttgttctaacgttttatttaaatcaatacgttttgttatagaaagcaattgttcgttttgctcattttttagatgcagtcttttttcttcgatttgatgacctattgctctaaaatcgggaatagtctgtattaattcttgagttttcatgtgatgaatttgtttaaattgaattaattgctcatcatcaaatgcttcgatatcttcccatagtaattttatttgattgtatcttttttcaatttgttttttctcttctttcacttcactttgaagaagtttttgaatttcttcaaaacgtatactattaaataaagttcttaatatcccttgtttatctgtactattggatactaaaaattttttgaattcaccttgtggaagaataaataactgtctaaattgttcagcattaactcctagtaatgatttaatatattgatttccaacgctgattttactttctcttaattcatatgtttcacttttagaatcatattcatacacatctagttttcctggtgtttgactagtgtttccttctttagtaaaagcgccttgacgaataattttgaaatattttttattgagttgaaattcatattcaacccacataggagattttgcctctgcaaaatgacttcttaatcccgcttcacttctgccttctgtagaagcttttccaaataacgaaaatacaattgcatcaaatatcatggtttttcccgaaccagttttaccactaattaaaaaaagttgatcatttttaatttgagtaaaatcaatcatttcatgtaagaatgggccaaaattatgtaacgttaattttattggtttcattttagacctccttattcgataccaaagtgattaaattatttattttttcttcctggtattttgtcatctcattatctgtaatcatcttataaaattgcttaataatagtttggtcgtcttgttgttgtatttgtgtctgatgtaaaggtccctcattttcaaaagtaatattgctaagcgcaagagtattagggaatagttgttttaaatgaatcattggatcactaatatacgacatatttttaagtttgaaatgtatataattatctttatttttaggttgaatatgtccttgaatcacttcatcatactcgccctcaaccacttcaagctctcttaaaggtttaagttgcacaaatgatgttgatatttcatttttatctttaatcaccaaacgtttatatcccttaggctggtttatttctgaaaatgaatattgtaacagtgaaccagaataatcaataatgtcatctttaatactaaatggatgatgtaaatgtcctaataacactttatcaaatacgttaaaacacgatttagtaacactttcaacagtcccaattgttaaaggtctttctgaatctgatgtttttcccccatttatcgttaagtgaccaattaaaatatttattttctctttattcaaattttctactatataattaatacatttttctgttgcttgttgatacgtttgaatagaagcatctttaaaaaattcttttacttcactaatagtagcaaatggaagtacatagaaatgtacatcattaaatacgataggctgattcatatgttttaattttgtacgtataaagagtttggaatgttcaaaccatgaagcaccataattcaatcgttctttaccgtcgtgattaccattagaaataatcatggggatattcatatctatattaatcgtatgaatagcattttcaaaaagataaatggtttctttactcggataagttgtatcataaatatccccagaaatcacaactacatcaggtttttcatcttttaaacattgaataaattgttctaaaataaatgattggtcttcaagaaattgttttccgttaagtatctttcctaaatgccaatctccagtatgtataattttcataacattccccttactttttaaagaattataatttaattttaaaaaagagcgagattgaattctcaatgaactcacatactcgctctaaacttcaattcaatttaatatcaaaaaataatattttatttaattttagataagctaatattattaatctctattatgagactaaagattttttaacgtttttatatttatataacatagctaaacgccaaggaacaatcatactaaatgccaataaaaagaacatgcctccgatttctcctggatcaatagagctactaataaatatttttatgattgttctaataattaaaagcgaaattaaaatgattggaaacgcttttgatcgtttcatatatacctcagcaccttgaacttcaaaatgacttgtccagataagtacagacgaaaatatcacacctaaaatgatagattctaaaatttcagccccagttaatctaaaatatggaatgacatacatcaaagcacctgtcgacataaagataggaggtaaaataattttcttttcatttacagggaatttttgtgctttcatacgaataactatgacaacaatccccataaacaatgcaaatactatggaaaaaactaaatatgccaaatttacaccttcttatattcacataactaaaagtttaatactattataattcttaaatactccaactaaaaatgttttacaacaaaaacaaaggattgtaaacccttatggcatacaatcctttaataactattatttttttgaactcttcatgttttgatccatgtttttgttcatcatcgtcatcatttgattgattttcttttgagacggtttttgtcccatttgcatcatcatcatacgtaacatttcttcattgataggtgggttttttttcaaatagtccatcatatattttcttgctaagaagaaaccaccaactagtccgatgataagtgctacaatgattaataaaattgctaaccaagttgccattgtttcacccactttctatatcctactgaattttactaaataactatcttgatttcaagagttagttttagaataacaccacttcgcttttatattaacaaactgtttaacacgaatactaatattataaatcacttcatataaagtactattcacaaaataagaaagagcaggaaagaactcattttgaattcatttcccgctctctatgttgactaaatcataatattaaaaagtgcgaatttgatttaaaatattttctttagtaaagccatatttttcaacaactaagtctcctggtgcacttgcaccaaaaccatcgattccaatgactttgccttcagtgcctacatatttatgccaaccgagtggtgaagccatttcaattgcaacacgtttagttaattcttttggaataactgattctttatactcgtctgattgttgctcaaaagcgaaccagtttggcatagaaactactcttacacctttaccttgtttatctaaatctttagctgcttcaatagctaagcttacttctgagccagttgctaacaatagatattctggtttagtttcagtttcaaatacaatatatgcaccttttcgtacgccttcttcaaccgtttcttcatctacatctaaataaggaaggttttgacgagttaaaactagagatgttggtgtttgtttagattctaatgcaacttcccatgctactcttgtttcattaccgtctgctggacgaatgacgttcatatttggaatagctcttaaacctgctaactgttcaataggttcgtgtgttggaccatcttcacctacagcaattgaatcatgtgtaaagataaatgttgcattcaatcccataattgcagataagcgtaatgctggttttaagtaatcgctaaatacgaagaaggtagcaccataaggatgtaaacctccatgtgctgccataccgtttactgcagcacccatagcaaactctcttacaccaaaccaaacatttttaccttctggagtattaggattgtaatctgtagcttctttaacatttgatttattagatcctgctaaatctgcagaaccaccaaagaatgaaggaacagatttactaattgcttgaatgatttctccagaatctgcacgagtagctgcattatggtcactactgaattttggtaattcatctttataattttcaggtaatttaccactgattgtcaatttaaattcttcagctaattctggatatttttctgtatatgtttctaatttttctttccactcatcttcatgctcatttgcacgttttaacattgttgtttggaagatttcatatacttcttctggaacattgaaacgtttttctggatctaatccatatgcttcaaatgtaagttttctttcatcagtaccaagtggcgctccgtgaacaccatttgtaccgctaacgtttggcgcgccgtaaccaataattgttttaacttcaattaacgtaggaccattttgctgtttagctttagtaatcgcattatcaatttcttctaaattgttgccatcttttactaaaatatggttccatccataactttcaaaacgttgttttacatcttctgagaaagatttgttaagttcaccatcaagtgaaatatcatttgaatcgtataatacaataagtttatctaattgattatgaccagcaaatgaagctgcttcatgagaaataccttccattaaatctccatctgaagccaacacgtaagtataatgatctacaacgttaatatcacctttattaaatttaccacctaaatgagcttcagctaaagccattcccacagacatagcaaatccttgccctaatggacctgttgtaacttcaacaccatctgtatgacgaaactcaggatgtccaggtgttttagaaccccattgtctgaactgctttaattcttctaattctaagcttccagagacatgtaataaactatatagtaaagcagaaccatgacctgcagataatataaatctatctctgttaaagtagtctttagattgtggattaaagtttaagtggcgagtccaaagcgtgtaggccattggtgcagctcccataggcaaaccaggatgaccagaatttgcttcttcaattgcatcaatacttaatgcacgtatagtatcaatagctaattggtctttttcattaaacatcttacatacttcccttctagaattaatcatcttttatatattataacttaaaaatatagtaaatgataagattataatgttaatgattaaaatgttattaactattgatcattcttttttctttcttgactttttttaagtttttcaggcgttacatcgttgccttctggatcaatgactttggtactttcaatttgttgtttaaatccctctctaaaagaatctaaatattgtttacgcaacttagattgctcttttgcttcagcttctgttaaaccttgctcttttttcttttttgctaattcattaattctatctatatttaaattattatttgacatgtcattacacttcctattcttttctttaatacatataaaatacttaattaatataacaaaaaagagacatagataaaaaatctaagcatcataaactctttctaaaataaatgaagtatttttatataatacttcatattcccatttcttagaagtaataactttttatctgtatctcttaaatatttatttaactaatgcgaacactttatagtctgtttgttctgtattgttgggtatatcgttcttataatcatcgtttaaaatcgcttttttagggatcgtatgatcggtaatttcgtacatgtgttccgtatgagcgttctgatataaattagtaaaaaacaccagaaaaacgatgcaagatactactagaacaattatatttttaatgatattactagtacgattactaagcatttattttcactcctagaacatttgtttgtataaatactttaacagaactagtgttcctagtcaatagaattacgaacaaacgtttgtttaaaaaatcaaaaaatgctatactatattaaaataaacttagggagtgcctatatatgagagagttaactaaaagacaaagtgagatttatgattatattaaacatgttgttcaaataaaaggttatccaccaagtgtaagagagattggtgaagctgttggtcttgcctcaagttcaactgtgcatggtcatttatctagattagaagaaaaaggatatattagaagagatcctactaaacctagagcaattgaaatcgtgagtgaccaaaataatgatatgactagagaagaaactatctatgttcctgttatcggtaaagttacagcaggagttccgattaccgcagttgaaaatatagaagaatactttccattaccagaacatttaacgtctacacacaatagtgatgtgtttattttaaatgttatcggtgaaagtatgattgaagcgggtattttagacggagataaagtaattgtaagaagccaaactattgctgaaaatggagatattatcgtagcaatgactgaagatgatgaagctactgtaaaacgctttttcaaagaaaaaaatcgatatcgtttacaaccagaaaatagtgctatgagtcccatatatttagataatgtaacagttatcggtaaagtcattggtctatatagagaattatagtttatctcttgttcgttacgttaaaatctcttatatatgtttaatatacaaaaaactagaagcgcatagacgcttctagttttattttttatttaaaatctcttttactttatcaagtatatcttttttcttatttttctttgtaggcataatatcaacttccttgcaaaatgaacatacccctatatattataaatcaaacattatccagcgtagttttctgtccaaaatggttgtcgatttttattaaaatctacacctacacctaatgtatttacgtgcgtatttaaaatattttctcggtgtcctagagaattcataagtccttcgtgagcataaatactactttgttgaccataagctaaattttcagcagcagcattaaattgaataccatcacgtttcattctatcgaaaggtgaatgaccatttaaatcagtatgatcaaaataattatttttaaccatatcttcactatgttttcttgcagtatgagatatttttttagagtaatccaatgtatttaatccgtgttgttttctttctgcattaactaaatcaaaattttgatattcaaagcttttttctagcgttgtagatggtgcaccatattgcttttgtaatcggttttccatcgattcactcacttgcaacaaccctgttaagttatttttattatgtttatcgtaaaatgcagtggtataaatgtgatctttataaaaaacatcatattcattattttttacaacacaacgataacgtccttttgtaattttatctactggtttaccgagacgttgttcaaccacttttttaggggtattatatttaattttagatttagaagttataatattttgattactaaataaagcattaactttattattaatgtaacttaccattaaaaaattttgataatcatcattgtaataagtgtaccattttgtaccatattcatttgatgtcactctttttggtcgccctatcttattttctacttccttttgagacatatttaattgaatattattaactgcaaattcttgtttttttggaactttaagcacattatttttaaaacttgtatcttcatttaataaaacttctactttatctcttacattattttgtaaattaataaaaaactggttttcttcaatgggtttaataatgataaataacaaaaatattgcagtaaataaaaggaactttttaataatattcacctactaaacatatattaatctctatcaccattaaaaattgagtttcttacaataacatagtcaacagtagttagtgattttaaatctttaccgccagcataggaaattgagctttgaagatcttgttgcatttcaactaaggtatcttttaatgaacctttatgttccacaaacattttcttcccttcaacattcttatgttcccctttttggaattcggaagcactaccaaaatattctttataacgtttaccatctaactcaactgtttcgccaggagattcttcatgcgctgcaaataatgaaccaatcataaccatagtagctccaaaacgaatagatttcgcaatatcaccatgtgttctaatacctccatcagcaataattggtttacgtgcagctttactacaaatgtttaatgcagctaattgccatcctcctgtaccgaatccagttttaattttagtaatacatactcgtcctggtcctataccaactttagtagcatctgcaccagcattttctaactctcttactccctcaggggttcctacattacccgcaataacaaatgattgaggaatatgttttttaatatgtttaatcatattaataaccgaattagcatgaccatgagcaatatcaattgtaatatattcaggtattaagtgctcagtttttaatttttctataaattcaaattcagtttcctttacacccactgaaatagaagcaaaaagtcctttattttgcatttttttaataaaaggtatgcgacctacttcattaaagcgatgcataatataaaaataatcattttctgcaaaccattctgctaaagattcattcattactgtttgcatattagctggaaccactggtaacttaaaagtttttggcccaaattgtacagtcgtatcacattcagatctactattaacaatacatttatttggaattaattgaatatcttcataatcaaaaattttcatactttaaatttcccctatacattttaaatttaaaagacactgtagacataaataaaatatctgactctttacaaaattatttataacgtaatctagagcgagaaatcacctttttctcgctcttattatttatatccttatatactttacaattttttaaatacaatgtaaacggactaaagtattagtttcaattaccaactagattttttcacaccaggaatttgacctttatgagcatgttctcgaaatgcaattctagacatttcaaattttctcattacacctctaggacgtcctgtaactttgcatcttcttgttaaacgagttggagatgaatctcttggtaatttctttaatgctttataatctcctttttctttcaactctttacgtaattcataatattgatttactaatttttctctttttaattctttagctattttagattttttagccatatattatctcctttttataaatcgtaataattacgttttatatattaacatacttttaaaaaattacaaagacatttattttaaaattaaaagactcatacatgttattcatcttaaacatgtatgagtctataatagtttatctttttgtcgtatttaaaagataaggaattatttagtttcacggtgtagcgtgtatttatttaatcttgggcaatattttttcatttcaatacgctcagggttattacgtttattttttgttgtaatataattacgatcgccacattcagtgcaagctaaagttacattaacgcgcatcaataacatcctttcttgttatatataattaggaattcttacgatttaaaattctatcatatccttcattttcacgcaataagtttcttttaatttagtcagtttccttctacataacaaaaactaatcgtttaaaaaatcagaaaatttaaaatttttaaaacaaattgttcaaaagttattgaatacttgaaccaaaacgattaaaatgatttgtatattttaaattttaatttaggagatattatatggaagataacaatatgaaacgcggtcttaagtcaagacacatatctatgattgctatcggaggtgcaataggcactggactttttgttgctacaggtagtgtcgtttctcaagcaggacctggaggagctatcttagcttatttattgataggaatcatgctttactttttaatgtcatctattggagaacttgctacattttatcctgtatctggttcgtttagttcatatgctacccgtttcattgatccgtctatcggttttacaatgggctggttgtattacattctatggtcattagtatcaagcgttgatgtaatggtagcttctaatgttttattttattgggatgtatttaaaattttcagtcctctagtatggagtttaatttttataacgattatattcctattaaatatctttactgttaaagcatttggcgaaacagaattttggttatcactaattaaagtagtcacaattattgtatttattgttgtcggtatattaatgatttttggtattcttggtggacatacatatggattcgagaattataccaaaggtgaagcaccttttgtaggtggtttatctggtttcttagcagtattacttgtagcaggattttctgtgggtggtacggaagttgtagcggtcactgcaggtgaatctgataatcctgaaaaaactatgccaagggctgttaagcaagtattttggagaattttattattttatgttttatctattgtcgtcattgcagctattattccttatactgatcctttattattaaataaaaatcaatcagtatctcaaagtccgtttactatagttttcgatcgaatcggtatagcatttgcagcatcaattattaatgctgttattcttacatcgttactatctgcagcgaattctggaatgtatacaacaagtagaatgcttttctctttgagtgatgaaaagcaagcaccaaagtttttaagtaaattaaataataaaacaaaattaccgatgcgttcattagtcaccacttacattttagtagtagcaattattattctagctaatttctatgctaatgcagtatttagcttgttaaatattattggctctttagttattattgtatgggcaataagtgcatgggctcaaatacgtttacgtagaggtattaaacgtcaaggcaaagatattaatacattattgccttataaatcaccacttttccctctaggtcctatcattgtatttgctacattaattttcttatactttggtaattctatcggtgatttatttagtggtaatataggtgatttttttgttaatatcatgcctttaattgtcttagcgattatctttatcgtacataaattgattcgtaaaactaaatttgtaaaattagatcatatggatcttacagctcatcattatcatgattaatatcatcgtttatttaggagtagaattaaatacaattctactcctgtttttattactaaacacaatatgtatattttctaatagtcgtttattttgtataatgagtataacgataacgacttagaggtgactgagtatggtaggtcaaacaaatttatttgatgacgtaataaagagcgatgaacgttttgttattgtcgtacaatctttagaagaaagaaatggacaattactgaaacgcacattgcgtgagtatcctagtctaactcatgatcaaatggaaaacttatttacacatttaaaagatgtatttcaagatgagccatttcgcgataaccaatctgcatatacagtaacagtatatacaaatttagattatgcagctgatcaagtatatgctcatgtaaaaagaaataaaggtaaacgtgattggacacacactgctaaataactagttatgataataaaaaaaggaagcgaaacttgattcaatacgaattcattccgcttccttttaatttatataaatgttttatagcaattctttaagtgctgctggtataccattagaatcattatctaatgtaactttatctgcaatcttttttaattcttcactcgcatttcccattgctacagcatatcctacaacttcaaacattgattggtcattgaggctatctccaaaacaaatcacttctgataatgaaatatttaacttttcacataaagctttaattgcattacctttagaaacatctttagccatgaattccaggaagaaaggtttgctcgtcgtcacatcaatatcagaattaaatgttccatttaattcgttacgtgcttttgaaatattttcttcataatcaacgcccattgctttaggtacatcagactgaatatacgctttaatatcatccacttgtttcataggtagaccagttaattctgattcaattttacgatattcatgttctgtatcaaagataatttgtccgtcttgatacgttaatgttaaaaagcctttttcgcgacaataatctgtaattttatcaaaatgatctttagttacacttttacttacttcaatttcttctgttttagcattaattgttttaccaccattataactaatgatatagctttggtaatgatctaactttaattctttagctactggaatcattccctcagttggtcttccagaggctaaaacaatcttatatccttcttcttgtagttgaattaaataatctttggtttcaggactaactacattatcacttgttattaaagtgtcatccatatccataacaatcattttatagttactcatttcttagttgctctcctttcatttttgctcttatctattttacaataattttatgaaggatacacaacttcttcaataacacctacattattaattgttgcaagttcagaatcgcaagttgttatttctgattttaatgttctcacaagtgctccacttttttctttacgactcaatgtcaatatcgttggacctgctccactaatcactgtagcataagcatcatatttttgagatagtatttttactttttcaaattcaagaatcaagtgttgacgataaggttcatgaaaaccatcttgtgtcatcatttttccagcaaggtcataattatgttgaattaatgcacaaatcattgtattgctaatcgcactattttgaactgctttctcatgtgaatacttatctggaagtaccctacgtgagtcttctgttttgagttcatatgttgggatagtaagaatcacatctacatcaggtatatcaatatgtgccacatttgtttctttggtttcaggattataatatcctgcgagtaatccaccataaattgtaggtgctacattatcaggatgtccttctatgtcagtagctagttgtagtaattcatacttagataattggatattaccgaagtagttagcgatatataatgctccaactaaagcggatgcggatgatcctaaccctcttgctaatggaatttcacttctcatcgacacttttaaattaggtaaagtcacattatatttttcagctacttgttgtgcaactgtatagatataattacttttatctttcggtaatgattctaactcttcgtttaaatatctaaattcccagttacttccttccgcttcctcaacatataggtataaatatttattaattgccataccaatagaatcaaatcctactcctaagttagcagttgatgcaggtattttcaggtgaagtgatggcttcatattaaagtgttcctttaatataattgataatactttctttattgtttggaagcggttgaattggattatctaaaactgagatagcagtgtctggatcttttagtccattaccagttaatattgctactacttttttacctttcgacaattttcctgcacgttgtaatttgattaaaccagcaattgaagcattacttgctggttcactaaatacaccttctttagatgtcattaattgatacgcttctaaaatttcatcatcagtcacactatcaatgaggccatttgattcttctaacgcaacagtcgcttttttccaacttgctggattaccgatacggattgctgtagcgattgtttcaggatttttaatgactttattttgaacaattggtgaggctccttctgcttggaaaccaaataattgaggaagttgacttccttttttctcatgatactctttaaagcctttccaataagcagtaatatttcctgcgttgcctactgggattgctagaacgtctggagcttcttctaattgctccacaatttcaaatgcacctgttttttgtccttctattctaaatggattaacagaatttactaattcaatatcatcatcattttgtgcaatctctttaacgatttctaatgcttcatcgaagttaccttcaattgagacaatttctgcaccatacatgaccgcttgcgaaagtttacctaaagcaatctttccttcgggaatcactacaattgcttttaaacctgcacgtgcagcataagctgctgctgaggcagaagtgtttcctgttgaagcacaaatcactacttttttaccttgttctttcgcttttgttacagccattaccattcctctatctttaaaagaaccggttggattagcaccctcatatttaacatataaatcaatatctagcatttctgatatattagcacagtgaatcagtggtgtatgtccttcatttaaagtaagtttaggtgtatcttcattaaccggtaaataatctttaaattcttctactaaaccttgccatcttttcataattattaaactccttcaactggataaattttttcaatgttgtaatttgctttactaagtagtgattcaggtgattggtctaatccgataatcacaacgccataagaactagaatcacgttgttctatttgaagtgatttatggaatggtaaatctgatttaagttgatctttaagtttatcaattgattcattactatgaatgacaacatagtaatttaatttttctccaatagcaattgcgtcaccattatccattaattctcgagttttatttgtttttaattcgaaatgaggtggaagtgtatgtaaatttgactcaaagaagagtgctacatttaataaatcactcactactgcactaccagtagctaagctacctgcccctttaccataaaacatagtatcccctacagcatctccaataacataaattgcattgtattcattttctactgctgcaagctgatgtgatttatgtattaaggttggttcaacggatgcattaacttcgctatgatgatatgtacttttaccaattaatttaatcttataacctaatttgtctgctacattaatatcagataacgttgttttactgataccttttactttcacatcatttaacttaattacttggttaaatgataaataagaagtaatcactacttttctagctgcatcaataccttccacatcatcagtaggatctgcttcagcaaatcctaatctttgtgcttcagcaagtgcatcttcaaatgaagtttgttctcttgtcatttttgaaagaataaaatttgacgtaccatttaaaatccccataaatttagagatattattagcatttaacccattattaatcgcgttaacaatgggaataccacctgcaacacttgcttcaaattttaaggctactccttgttgttctgctaggttctctagtaattctaaatgcacagcaagtagatctttatttgctgtaatgacatgtttttttctttttaaagattctcttaaccaatcaacagttggttcaattcctcccattacttctataacgatatctatatcttcatcgtttaaaatttcattaatgtcttctgttaaatgatattgactaatattaataggtctttttttagtggtatctcttactaaaatatgtttaataacaatatctttatttagagtatctttaatttgttgtcgattttcttcaataatttttactacacctgagcctactgttcctaaccccagtaatgcgacgtttaattccttcataatttttatcttcctcccatttgtattattgagaagtacaattgttttattgaaaaacacttaaatttattatactattaaatcaaattagttgaataggacttttaaaagaaaaagtgaatatgtagatatatattatcatgtagtatcaggaaattaaatagaattttctgattttttagaaaggttggtaaattttatgaaagttgctaagtttggtggaagttctgtttcaaatgcaacacaaattaaaaaagtcctaaatatcgtcaatgatgacccagacagaaaaattattattgtatctgcacctggtaaaagacataagaatgacgttaaaacaactgacttacttattcgtctatatgaaaaagtaatcaatcatttggattatcaagataaaaaaagagagattattcaacgttatgcagatattttagaagaattaaatatggagtctacactcttagaaacaatagatgaaacacttgaaacaatcattaaacaattaaacgataagcatgatcgtttatacgatgcattgttatcatgtggtgagaattttaatgctcaacttatcgctaaatacaacgattctcaaggcattaaaacaacatatctctcaccaaaagatgctggtatcttagtaactgacttaccacaacaagcacaaattttagaagacgcttatgataaaatttataaattaagagaaattgaaggaaaaattattatcccaggtttctttggtgtttctaaacataactatgttgttacatttccgagaggcggttcagatatcacaggtgcaatcatagcacgtggtattaaagcatcattatatgagaattttacagatgtatctggtatttttaaggcaaatccaaatgtaattgaacatcctgaacttattgaagaaattacatatagagaaatgcgtgagttatcatatgccggctttagtgtttttcacgatgaagcattacagcctttatataaacatagaatacccgtagtcattaaaaacacaaatcatccagaggacaaaggaacctttattcgccatgatcgtgaagtcacagataaaaatcaaattattggcattagttgcgataaagatttcacagttataaatattaaaaaatacttaatgaatagacaaattggttttacaagaagaattttagaaatattagaagactatcatatctctttcgatcatatgccatcaggtattgataatattagtattattatgcgttctaatcaaattaaagacaaagagaatgaagtattgagtgcgattagaaaaaaatgtgatattgatgaattaagcattgatcatgaccttgccatcttaatgattgtcggtgaaggaatgactcaatctgtcgggactgctaacacaatcacacatgctctagcagaatccaatatcaacctaaaaatgattaatcagggtgcttctgaaatttctatgatgtttggtatttcaagagaaaatgcagataaagctgtgttatcaacttatgagtattgctatcatggtgtatgcttaaaaaatttatgtcctaaataacaattacataaaaaaatctgagacatctatttgtctcagattttttatattaaacttttagtgtaagtgctttttcaattttatgctctcccactaccatttttaaaatcacaaattgataatagcttagagcatctaaaactgacttataattggcttctaaattattttgttgataatctaataaatcatacattaatacgatttcaggtttaatataatcgacatcccaagttaatgaatgaaaataaatactatttttaggtagtcggatattagtgtttagtctaaatatacattcctcatttataacatcataaataaaaatacttaaaataactttatcattattaacaacgtttatttgagaaatagatggaatatctaaattatttttatccatgttatgattggacatatcataatatttaaatgtataacttgaaggaataacttttaaaacctctactattcgttttctttctacacaaatatcgactttcgaaggtaattcaaaaagttcatttaaaaatagttgaatagcaacttcaccgtgaaatttgaacgctgtacggcattgattttttaatattccaactagttcttctacatgattttggtgatgagacatacaactgtcctccttaaaggaaacgctttcataagttaattatacagacacaattttatattttcaattttaatttgtgaaaaatttgtaattcttttaactcttctttaggttataagatataattttacacaattttatatttataataatgaataaattatatcctgttattatgttctttttcaacttaaattatcattttttgtttattgaacattaaatatattttgtttataattaattattgatttctatagaaaattaatttagtcattaatcttctaatttacaaatattaaacaggaggtgaacatatgacacatacgattattctgattattattattgttattcttatacttgcatttatacttaatcaaagatacatgcaagatagaatagatactgaagtttacgctaaaaatcaaatggtctctaaaaattctttactcagtaaagaaaatttagaacttaaaaataaaatattaagttctaataacgagattagtcctcattcaaaacgtaatgctaaacgtgaattacaagatatcttagaccgttttaaagcttcaggaaaattaaaatattataatatcattacgactagtaatttagctactaaacatccactgtttgagtatgcaagaacctttgactatatagttgtatctgacgtaggtcttattaatattgacgttaaaagttggaaacaaaaaacattttatcattttgatttacctacttctgatcacttagagggtaatgatcaaagtgtagaacaaattgtaggtcattatattagtaagcaatatcatagtcaatttgattcaaatcgtaatgaaatatatacttttgttgaaaaaattcaaaacaatcgagtcatctatgaattttatcaacatgatccttatgaacaagctgctattaatgcaaaaatcttaaaagatggcattgaaaaatattttaatcataaagttcaaagtattggggtcatttattttagtgatggtagtgttaatataattgaaggtgctggcgaaagagagaaatatattgatacagtatccacgaaatcttctttagaatctgtgattaataatgctattgaattatctaaacaccctctatctgaaactcaagttaatactattgttgaaaactttcataactaaacaatgagtatgggagaacattcttgacgaatgttctcccatactcattttttaactccaaagattcactttatcttttttagcttgctgttcatctttttcaaatgtacttctatatttaccgttaggtgaaaagtatttttcacgagctaatccttttttaactaattcttcgttatacattgttttttcatctaaccatacataggctaatgtacgaccataacggtcttctttttccttatcatattctaaatacacatctttattatttaaatgttgtttgctgtaattagaagcttcttttccataaggttgaactggtgtgttaggtttaaccgtttctggtgtatcaacaccaattaaacgtaccttaatttgctcaccatttgatttcttagccacaaatgtatctccatctacaacccgatcaacgtggactttttcttttcctttaaattctgtctgtgttgaattagatgaagaatgttgactatcgtctttaaatggccctgtatgatttaaaaattgaaatgctaatacgccaataacaatgacagcaaaaacaattattgttaaatttttctttgaattcataggtgcctcctatattatatttttaatactcaaatataatatataatatgtatttaataatcaatcaatactttcgacctaaaaagtctacctatattgaatttattttcaaaaaatgattaattgatattcaacatgatataattatacatgttaggagtgaaatacatgagcgaacgtaatgaaaatttagtcacgatgattgctgtcgtaattgctattatcgttggcgttattttacaaatcgtttataaactgcctattattgtttcggttgttatagcagtattgttaggcattttagttggatttattgtttatattattcaaagtattatacgtaaacgaaaagataaataagggagtatcatacaacgtcactctcaataaaagactgaattgaaaacattaaatatcattcaattcagtcttttttatatattatttaaaattttttacttacttttatatccatcctttttctttcgcctgcttccaagcattaaaccgattatctgcatttaatttatcaattatattagacgtataatttcttactgttccatctgagagataaagtttttctgcaatttctttactacttagattatttccaatttcacgtaatacaacttgttctttatgtgttaagggattagattctttaaataaagtagtcattaatgaagtactatactctttttcacctttcatgacattttggatagtttgtattaaatcttctactgaacgttccttcaatacgtatgcatctacatcattagccacagctttttcaaaataacctggtcttttaaatgttgttacaataatgactttagtatctaatttaaattcttttattttaactaatacttctaatcctgtcagtccaggcatttcaatatctaatatagcaatatctggatgatacttttcaataaaatcaaatgcgtcaaccccattaccacagtcctcaatcacgttcatttggtcattgaattcaatcagttgaaccatcgcttttcgcaacatatattgatcttctgctattataatgctaatcatttaatatcctctcttggtattataatacgtatatgcataccacttttatctttaatttctagctttccattaagaaattgaactctattttctatactttctaacttaatgtcttctgtatcgtttaaaccttttccattatcttgaataattaagtagagttcatttttttcttgtctaacctcacaacagattttactagcatttgcatgtttaatgacattattgattgcttctctcaaaatcattgatagtatagattgctttgttggatttaaaacatttacctttcttatattttttaattcaaattgaatgtttgcatcttttaaaacagtttttatagattgaatttcctcttcaaaactttgagattttaaattttcaataatatttcttaccttaattaaggtagctttagatatctgattaatcgctaatatttcatttttagctttttcttgatttttatcaatcaacttatatgccaattctgattttaaactaaggcttacaaatacatgccctagtgtatcatgtaaatcttgccctatacgttgacgttcttgttctgcaattaatgtattaatatacttatttttctcttctatttctttttttaatgctctatcttttttagttttaaaatttcctagtgtaataattaaaataactaaataaaagataattaatacagaaacatattctatttgataaaaacttgtaattgtgagacataaaagcattgcaattataaatgtaataaattctttagacttaattgttacttcaaacatgaaaggtaatgcaaatgcgctaaagaaaaagaataagctattcattggattaatagtataaacaaaatatataattcctacataatgaaccactaataggctatatattacgttattgttaaatcgataataatatattactaacataagataagacacaatgaaaatagctaaaacaattaaatatacagtttgagaacctcgtttttcattaaagatgcttataattggaaataacaaatataaaagcgtagaaagttctcctaatctaatactccattttcttttttccatctagttcacttcttttctttggttaatccacattgcaataattaaaaacattatactatatacaattaaagtaaataatgaagtaatgtttaatccttgatttttaactaattccagtgccaaatttttcaaatgatatgttggagtaattttcgaaattttttgtaaccaaattggaaatgtttgaactggaaaccacaatcctcctaatatcgctaacaacatattaattatgtttgctatactatttgccttttgtgtctcattaaattgagcgattactagtcctaatgttaaaaataaacttgcacctacccataatgaaacacctgaaagcaaccattgttgtatactcatgtttacgtgtttatatagatgagcaacagtaaaaattaaaataatagccaataaaaatagcattattgtttttattattttagtagtaaaataggttttactagataaaggcgttaccattaatcgtttaaaccaacctgtgtttctttcttcaataatctctataggaaattgcattaaacaaaaactcatcaagctaaacactgtcatactatacatatattctttatagaactgctgtttctcctcttcaggtaagtctagtaaagaagtaaataataaataaaagcctaccggtaatatgattgataagaatgtagttagtttctttcgaaaaataattttaaattctgtttttaataaagcgatattattcatttttagtctctccctcttttacatcagcaaataaaattgtttctaacaatgtttgcttttcaatagtaatgtcatttaaatttaaatttaatttttccaaataatatattactttcttaacatcagatgttttaatttttaaagtagtatcttcaatttttacatcaaaataatttgttaaattctgtaaattattgtctactgtatttggcactttaattattgaatattgttggttggttaatatatttctaggtgaatcatttaacttaataataccttgatcaagaaatataactttatctgccattcgttctacttcttcaatataatgagaagtataaaaaatagatacattttctttttttaatttccctatcattgtccagaaatgttctcgcatttcaacatccatagctgcagtaggttcatctaaaatgagaagctttggttttcctattaaacacaatccaaaatctaatatacgttgttgtccaccagataagtgatttgcatacagattcaactggctatcattcaattttgtaatttttttaaattcatctattgaaattgcatccttgtacagttgacaaaataatttatataattcttttacttttattaacctaggaaaagatgttttttgaaataatacaccaatatgatttaaatttaatacatgatctatatctataatttctcccgtatctgctttcaaatgattaattaaaatattaattaaagttgattttccggctccattttttcctattaatgcagtactcatacccttttctatatttagtgatatgtttttcaatactgtctttccattatatcttttagataaatgtcgaatttgaatcataactcatcacttccttttgttaatatcaataatttatcaacaaacaagttataatttcagataaaaatgtcattatttttaagtgacatttgtcacattaataaaaccgacaaagcacaatgctttgtcggttttattaattcttacaagattggggataataatttggcaatatcttcttttaatttaattgataatggccgttttttatatttctcaagtgtaagttgtttagactttttaatatcttctttatacgcctcttttaacttcttagctaattgttcatcatatacgaatgcattaacttcaaagttcaatacaaagcttctgtagtccatattagatgaacctacactactgacttcatcatcaatcattaacattttagaatgtataaatccattttgatacgtatacacttttactccatactcaagtaattcaacaacatttgaaaatgtagaccagtagacaaagggatgatcaggtttacatggaatcattatgttaacatcaacgccagtattggctgccattttcaatgcattaatgtaagctcgatctggtataaagtaaggtgtttgaatataaatagattttttcgcactcataatcattttggtatatccaaactcaatttgatgtaattcatatgcaggtccacttgaaccaatttgaatggctgaatgaccattgtgtactttctttttaggaaaatacttattatcatattcaaattgtggacgatgtgcttgagagttccaatcaagaataaatctaatttgaagtgcatttacaacatcaccttgtactcttaaatgcgtatctctccagtatcctagtttacctaaacctaaataatcgtcacctacgttaaatccaccaatatacccgatttgaccatcaataacaataatcttccgatggttacgattattcattctaaagttaataattggtagtttagatgcaaaaaatgcttctacctctccacctaatgattcaaaacgtttaaatttgtgacgttttaatttttttgaacccacatcatcgtagagtaatttaacttctaaaccttcttttaactttgtttctagggcatcgataattcgtttgcctagaccatcgatttcaaatccaaagtactctaaatgtatgtaacctttcgcattataaatatcttcgattactttgtcatataattcatgaccatcaataaataaatcaattgtattgtcttcagtaataaaagcatcttgtttctttaatagcattcttgccatatcttgatgattttgtagctgcttattttctgtatgatagttgtgatgatcaattttatgagcttgttcatcaattaaatctttataaacatctaactctttaccattatttttctccatttttctttttgaaactgttctaccgaaaaatagataaagaataaatccaagcactggtaatacaaataatacaaatatccaagcccatgtcgaagatgcactacgtctgttacgctctagaaaaatcaaaataaaagccaacactaaattgactaaaaatccaagcactaaaatgatattcaatattgtaccaattttagggccaaaaagacttatcataattctaaactcctacttctcaaattcaacttttatttatcggctaatattaaaaaggcacttaatatttcttcattattaggaaattggcgttcttcaattttatcaattgaaacatttaataattcatagcgactaccttcttcacttgctaaatattgattaatttcattttccaattcttcaattgtttgttcttgaattcttttaaattttactttgctcatttgtaacactccatttcatatatttgtttaaatcatagtctttttacatatatttatcaactaaattgtaaggataataggatatcttttaaaaacgcttacatttttatttttattcacttaaattcacatttgtaaaaaggtggtgtatactaaacacattctattcgaactttcagaataatcagtttagaataagcataaggaagttagggaggaattcgatgatatcttttgaaaatgattacctagaaggtgcacatccaaaaattttacaacgttttattgatacaaattatattcaagcttcgggttatggggatgatcaattttcaaaacaagccgctgatcaaattcgaaaaacgattcaatgtcctgaagccactgttcgctttttaattggtggtacacaaacaaatcaagttgttattaatactgtattaaagccatatgaaggagttatttcagcagatacaggtcatgtggcagtacatgaagggggcgctatagaatttagtggtcataaagtattagcagtgccatcttatgaaggtaagatttcacctaaagaagtaaatacctatcttgaaactttttatagtgatttcaagcgtgaacatatggtatttcctggtatggtatatatttctcatcctactgaatatggaacgctttatagcaaagaagaactcaagaatttatcagacgtctgtaaagaacataacattccattatttatggatggtgcacgattaggttatggtttaatgagtaatgaaacagatgtcacaattgaagatattgctaattactgtgacattttttatattggtggtacaaagattggtgcactatgtggtgaagcgattgtattcacaaataataatgaacctacacatttcactacacgtattaaacagcatggtgccctacttgctaagggacgtttagttggtattcaatttttggaattatttactgataacttgtattttgaaattagtcgacatgctattaatatggcgaataaaatgaaacaaggatttatcgataaaggttataaagtgtattttgattctcctactaatcaacaatttttcgtattaagtgatgataagattaaagatcttcagagtaaagtgaaatttgcaatttgggaaaaatacgatgatacacatcgtgttgttagatttgcaacaagttgggcaacaactgaggaaaatatagataaacttttagaattaatttaactattaattgatttaatatagaccttaagatgacgtactttgggtctatatttttatgtttacataatatttttataatttataaaggttttactgatatatttaataaatattatctaaaataggatttacatattatgaaaaaaattagtggcaggcgaacatgaaaaacaaaaaaaatatacttcttaaaatatcgataaaaaagataaaaaaagcaagataataacaaaaataaaaaacacatcatcttatcatttgattacttaaaactctcaatcaaactgcaaataagaatcaagcagcaatactattcaaaataataatagtaaacaaaatcaatattataatgaatggtattaactggtgatacgattggatacatcacacctgatgatacacagtgtactatatatctccgtcacaacaaaatagtaaccagaaaacttataatcataacgaaatttacagaacgaaagaagagcaaaaagtccgtaatcacttgattaatagatacaatatcaagttgattggtcaaagcaacattaaaattaatgtatatacttttatttattttcggaatatttctaattaaaagaagtttttctcattttctatatttgtgcgtcattattgtctaaattcttattgttctgtctttctgtcataatattactttgaatgttctaaataaaaattaacatttataaactaatattgaaaattaaataaaaagctaaacgatctatgattaaactaaaaaattttgaaaagtatataaagaatgttttttaatacttacttgaccaaaaattgaccaattcactactttttaagaaagtgatcaagtaaaaatagattatttttaaataaaaaagaagctaaggcatgtgccttaactccttatatccctaagtctttcccctttttgcttagcgattagtattgtttcatatattgatcgcgttcccattcagacacttgagttctgtaatagtcccattcgatagatttagaattaataaattgattatagatgtgattgcctaatgcttttttaactgtatcgttttcacgcattgattttaatgcagtataaagtgtagatggtaaatcttgaatacctactgcttcacgttcttcacgattcatttcataaatattttggtttactggttctggtactttagttttgtttttaataccgtctaaaccagcttgtaagatcgcagctaaagccatatatgggttagctgctgggtcaactgaacgtacttcaatacgagttgataaacctcttgaagtaggtacacgtactaatggagaacggtttttaccactccaagcaatgtaacatggcgcttcgtaaccaggtactaaacgcttatatgaattgactaatgggttacatactgctgtaaatccacgtgcattatttaagatacctgcagtaaagtgataagcatcttcagttaattggtctttgccgtttggatcaaagaatgcattttctttacctttgaataaagatacgttgaagtgcataccacttccatttacaccaaataatggttttggcataaatgtcgcatgtaaattatgtttacgtgcaattgttttaacaactaatttaaatgtttgaatgttgtcacatgctgaaattgcatctgcatatttgaagtcaatttcgtgttgacctggtgctacttcatggtgacttgcttcgatatcaaagcccatatcttctaattcaaggacgatgtcacgacgacaattttcacctaagtcagttggtgctaagtcaaagtaaccaccattatcatttaattctaatgttggttcacctttttcatccaatttgaataagaagaattccggttcaggtcctaagttgaaatctgtataacctaagtcttccatttcttttaatatacgttttaagttcgtacgtggatccccagcaaatggttctccatcagttgtataaacatcacaaattaaacgtgctactttgccttgacctgctgtccaagggaagataacccaagtatctaaatctgggtataaatacatatctgattcttcaatacgtacgaaaccttcgattgaagatccatcaaacatcatttcattatctaacactttttctaattggcttactggaacttccacatttttaattgtgcctaagatatcagtgaattgtaatcttaaatatcttacgttttcctcttttgcaaatttgcgaatatcttcttttgtaaaagtacgttttgacatggtagacatcctccaagttattaattaataaatcgtgataaatcgccacggtttatcggtaaagcttcactgcgcggtttctgagttgcatctacaatcattctttttctcgtttcttgttcatcagtagttaagtgcccttgattatttgtaattatttgtttaataccttttaaattaaaacctttttcaattaacgctttaatttctaacagtctctctaagtcattcatagagaataaccttttatttccttcggtacgttcgggcttaatgagttcatgtgtttcataataacgtatttgtcttgctgtgagttctgtcaatttacaaacaacactcatagagaacacggccatattacgtcttattgtatcgttagacactataacctcacctctacttttgaacttgtctataatttagcatagattaatacgaaatacaaaaatatgtcaggttttcttacatgaaaattaaatatttcttacatataaacataaagcccatagatacagttatctacaggctttttactatttaaaaattattttttacgacatcaatacgatagcgtattcttattgttgagttttgaaaacttaagcttcattaatggttatcttccatatttgcttcaaaatcatcaagtaatgctcgagcttcatccacagtttctgtactcattaattgatgtcgtaattcacttgcacctctaatacctcgcacataaattttaaagaaacgtcgtaaacttttaaattgttgtgtttcttcatttgaatacttttcaaataactctaaatgtaatctaaataaatccaagagttctttacttgtatgttcgcgtgggtctttttcaaaagcaaaaggattatggaaaatacctcttccaatcatcactccatcaataccatatttcgtcgcaagttccattcctttttgtctatctggaatatcaccattaatagttaataatgtttgaggcgccacttcatcacgcatttctttaatggcttcaattaattcccaatgtgcatcgactttgctcatttctttacgtgtacgaagatggatagataagtttgcaatgtcttgcttaaatacatgtcttaaccattctttccattcctctatattataataacctagacgtgttttaacactaacaggtagtccacctgccttggctgcttgaataatttcagctgctctttctggtcttaaaattaacccagaccctttaccctttttggcaacatttgcgacaggacagcccatatttaaatcaatacctttaaagcccatatctgctaaaccaaaactcatttctttaaattgttctggcttatcaccccatatatgagcaaccataggctgttcatcttcactgaatgttaaacgccctcgtacactatgtatcccttctggatgacaaaaactctccgtatttgtaaattcagtaaaaaatacatccggtctcgctgcttcacttactacatgtcgaaaaacaatgtctgtcacgtcttccatcggcgctaaaatgaaaaatggacgtggtaattcattccaaaaattttctttcataattgatttaaaccttcttattcattagtatctcgcataattaaccatgatatattatcataaaataaatccatatacaaaaagaaattcactctcattatttttattactatttatttttgaatattttgttatactacttaaattaaattctgttcttttaaattcattactgcacgtgttactgcaattttaacatgttcataagttagaccaccttgcacatatgcctcataaggcggacgaatcggaccatctgctgataattcaatagaggagccttgcacaaatgttcctgctgccatgatgacatcatcttcataaccaggcatataactaggttcaggactaaagtgtgcattaattggtgaagcatgttgaatactttgacaaaatgcaatcatctgttcttttgtatcaaattgaacggtttgaattaagtctgtacgcttagcatcgtacttgggtactgtgttcatattcattttttcaagaagtaaacttgtaaatagtgcgccttttaagctttgactcactacatgcggtgctaaaaagaatccttgatacatttcttgcaatgaagataatgaagcacccgcttctttaccaatcccaggtgcagttaaacgataaccacatcgttcgattaaatcttttcgtcctgcaatgtaaccaccaattttggctaatccaccaccaggattttttattaatgaccctgcaattaaatctgcgcccacttctactggttctcgacgctctacaaactctccgtagcaattatctacaaaaacaattacatttggatatcgttgtttaatttgagaaataacattttctatttcatctactgtaattgaaggtcgttggccatacccttttgaacgttgaatagcaacaactttcgtttgtttcgaaatagtatttaaaaccatttcaatatcaatcattccattttttaatgcaacttctttatatgtcacaccatgctctttgagactttcaataccattaccattaacaccaatcacttcaagtaaggtgtcataaggactacctgtaatgtacatcaattcatcgccatatttgagtgtactttgcaatgctaatgtaattgcatgagtacctgaaataatttgagatctaacaattgcatcttctgctttaaacgtataagcatatatctcttctaaatgatcacgtccaaaatcatcataaccatatcctgtagaacctactaaatcattctcgctcgctttaacatgatgaaaagcatcaagaaccttttcctggttgatataagcagtttcttcaatttctttaaaaaagggtgttaacgtttcttctacttcagaaacgatgtgttgaatatctgacatgcaatttatcttcctttatatataattattttctatatcctttaacgatataactttcattattctcatcaaatttcatttcttcgataagtgtatgttgttttaaaaaatataatctatctgcatcttcactagatacagtttctacgtaatatgacaaagtcgcttttatttgatcaaacagtaactgcttcacttttaatttatcttcactattgcgacttgatacaaatacagacggatggtctgatactggtacatcagtttcttcagaacattgatcttttttattaaaaatgattgcttgtggaaggtcatccatatctaagtcttttaccaattgattaaccgtatcatattgagcgcgatattctgaatgacttgcatcaacaacatgtagaagtagatttgcgcttttggcttcttctaatgtcgacttaaatgctgctactaatgttgtaggcaacttttgaatgaagcctacggtatcagaaataattaaattaaacccattgttaatttgtatttgtcgtgttttagggtcaagtgtggcaaatagtaaatctttttcaaaagtcgtttcgtttgctaaaacattaaaccaagaagattttccagcattggtatagccaataagtgcaatttgaaatacttgattttgttcgcgttgattacgatatctttcacgatgttcgaccactgttttaagttgatgtttaatttcattcatacgtgttctaatatgacgtctatccatttctaattttgtttcaccaggaccacgcgtaccaattcccccgcctaaacgagataaactttttccatgtccttgtaatctagggagtaagtaatcgagttgagctaattcaacttgtaatttaccttctctactacgcgctcttaaagcaaaaatttcaagaatgagctgtgttctatcgataattttaatgcccaaattatcatttaatgttttcgattgtgctgttgttaattcatcatttgtcacaacaacatcgatgtcatgaaattctataaaagctttaatttcatcaatcttacctttgccaacataatatttataatcaaattgatctttattttgagtgacttgtcctataacatctaattgacaagtcaacgctaaagcttctaattcttccattgtagattcaaaattatattgatgatcactttgagcatgtacaccaactaatacagcagtttctagctttttcttagtatcataagtgtgttgctgagccatgatatacatctccttttttaacatgtcttacatattctatcatagagcaagtttaaagactaacgactaaaactatgttaaattaaagctaagttgaaagggtgatagtatggaaaatatttatgattttgaagttcaaaaatctaatggtgaaaattataaattagatgtatataaaggcgatgttatgcttatcgttaatacagcgagtgaatgtggatttacaccacaatttgaaggattacaagaactatataataaatataaggaccaaggatttattgttttaggtttcccatgcaatcagtttggtggtcaagaacctggttctggtgctgaagcaaatcaaaattgtaaaattaactacggtgtcacattccctattcacgaaaaagttgacgttaaaggcgataaccaacatccattgtttcgttatttaacaagtcaagctaaaggtatgttaagtgaaaaaattaaatggaattttactaagtttttagtagaccgtgaaggtaatattgttcaacgcttctcacctcagaaaaaacctgctcaaattgaaaaagatattgaaaaacttctataaataaataaaagcttcaatatagatgactatgtcatagacaatcgttctatattgaagctttgttttattacaaacatttcttctatttgttcaaaagtgcaaaaattgatgagaattttgcaagctacgtatacattttgaccgtggactacgctctaaaagtcagtaacttggcactttaattacaacttattcttcaccttcacctgtagcttctgaatcagtagattctgtatccacagtgaaagtgctgatcgcatgtttgtaaatcaaatgttgtttgccttgagaaactaagctaatcatgtatttatcaaagtcttcgataacgcctttcatttgaaaaccatttaagaaaaatacagtaatttccgtttgttctgctttaaagttctctagtgcttgatcttggatgttttggtttgcaatcatgtttagaactccttttatttatttgggttgtaatctcatctaacatcatttgaagtgacattgtctctctatcaaaccattgaacattcattttgtttttaaaccatgtgagttgccttttcgcatattgccttgaatgttgtttcaataattctatagctggttctaattccatttctccttttataacagggacaagttctttgtaaccaattgcttgcatactctgactagattcaaaaccttgttcaactagtgctttcacttcattaaataatccgtggcccaacataatatcaacacgtttatttattcttgtatataatgttttgcgcgacatttcaatccctactaataatgtatcataattttctgtaaattgttgaactttctttcgagaacttaaaagtttttttgtttttaagtaatattcaatcgctctaagtactctttttctattatttggatgaatatctttagctgatgtttcatcaaacgatgctaagtagcgatgtaagtcatcattatttaattgatttaatacatctattttttcttttactcttaattctttttctactgatatattttcatcatcaaatggataatcgtaaattaaagattgaatatataaacctgtacctcctgcaataataggtactttacctctttttgtaatatcttcaataagcacttctgctctttttttaaattcgtatgcagaaaatgattcatcaggatttaagatatctattaaataatggggaatcccttccatttctgtttctgttacctttgcagtacctatattcatttgacggtatacttgcatcgaatcgccactaatgatttctccattcatttttttagctaattcgatactcaattctgttttacccgaagctgtcggccctacaatgactactagaaaaggtttttttgatgcttgcaatgattacgcctcactctgattatttttcaatacttgtttttgaatccaatcaaacatatgattccatatcatttgttgatcaacttcaaataatatttcatgtcttctatttgcataaagttgtaccgtaatatgtttaataccagcttttttaaattttctggccaaggatttaatacctctgccatactctccaaaaggatcattttttccagaaatcatcaatattggtaactgtttatttattttttttaattgactataatttgcagtacgtgtcatatgttttactgtttcataaattaattggtttgaaactaaaaagccggtatactcatcgtttacgaatttatcaacttctgtagactgtgatgaaagccagtcactttcagttcttggttgatcaatctttttgttaaatgatttgtaaacgagttgattgacccattttaaacgcttgcgcttcccagtaaaaatagaaattaatttcaaactgatccctgcaggaattcctttccatttaggatattgtcctgttccagttaatatcaatccattagcaaaatttggataagtttcaacgaataaacgtgcaataatagatcccattgaatgccctaatacaatatagggtaatcctttctcactatcatataatgtttgtgcaatttcaaacgcatcttgaacgacttgattcatgctgtcgtaatgtccacgttctttctcatcaatctctttcccatgtcctctatgattatgtctaatcacatcatagccttgatgtgttaaagctttaacaagtgtttcatatcgatccatatgttcagccataccatgaaatatatgtacaataccataagtcgctatgtttgctttatctactttaacttctaaagttgttccatcttctacagttattttataagcactttgccccacgtatatgcctccaatctctttctataatggtattgttaacaacgtactattcctactaatatacctatactctttaatgttatcaaatagtttgtcactttttaataggttatatatactttaaactcaaaaattttatcaaaatataaaaaaaactgagattgagtgtttttacccaatctcagttaatatactattttaactatatttatttttctgcaggttgatgattaccatgtgttgcttcttcaatagcttcatcaacttctttagaaaattcatttttttgttcagcagtataatttaataatttatctaattcatcaatgattgcttgtttatattgtttaactgtattgatgtcaaaatataatttaccagtacgacgaattaagaaatcagttggtttatataccatttcgttttgtacactataaactaattgaacgtataattctaatggcatatttaaatctttttcattcgttaattgtgcaattgcgaataatttatctacatttgaaccgtattttgaagctaaattatgtgccacatctgtgcttaatccaagtgctttaccttcttggactttacgatttacgtagttttcaaagtttttactaccgccaacatctccaccagaaataggtgtatttttagttttgctatccgcaaattttagaccatattcttgttttaaacgcttagctaataaatcaacaatttctaatgccatgtgacgatatccagttaatttaccaccagcaatggtcaataatcctgatttaccttcccaaatttcatctttacgtgaaatttctgaaggatcttttccatcttctaaaattaatggacgcacgccagcccaagttgattcaatatcagcatccgtaacatgcacatcagggaacatataattgattgcatcaattaaatagtctctatcttcttggttagttaaaggttttgttttttcattattatagaatgtatcagtagtacctacatatgctttaccttcacgaggaatagcaaaaatcatacgaccatctttttcagtatcaaagtaaaccgcttgacgtaatgggaattttgattgatcgataactacgtgaacaccttttgttaaacgtaattgtttattattacgtgtataatctttctttctcacttcgtctacccatggaccagcagcattgattacttttttagcgttgatttgatactcttcacctgtaagcatatcttttactttaataccacttactttatttttagcatcgtatacgaagtcagtagatttagtgtgattaatgacttcagcgcctttttcagcagcacgtttcatcacttcaattgttaagcgagcatcgtcagtacgatattctacgtagtaaccgccaccttttaaaccatcttttttcacaagaggttctttatttaaagtcgcttgtttagataacattttttttcgttcatgacgtttaacgcctgctaaacgatcgtacattgttaacccgatattagttgtgaatttaccaaatgtaccccctttatgcatcggtaataacatccattcaggagttgttacgtggggaccattttcataaactattgcacgttctttacctgtttcagcaacaactttgatttgtgcttgtttcaagtaacgtaaaccaccatgtactaatttagttgagcgagaacttgtaccttgcgcaaagtcttgcatttctactaaagctactttcataccacgttgtgtagcatctaatgcaatacctgcaccagtaattcctccaccaataactacaacgtcaaattctttatttcttaaattctttttaattaagttcctattaaaagtagataatgccataatataccctccaaaatttatattaaaaaaagagagacctatacacacacagaagcatactgcatgataacaggtctctcaaatctcgactaatgtattaacttaactacatcataacatattctttgtaactaagccataattaaaaattaatcttctaatttaaagacctgagtagcctctactgctttcttccaacctttatataacttagttcttgtttcttcagacatttctggattaaattctttttctaatttccatccatcagcaatgtcttttttatcttcccaaaagtctacagccaaacctgctagataagcagctccaagtgctgttgtttcttgaacttccggacgttcaactgatgtatcaacaatatctgcttggaattgcattataaagttattttttactgcgccaccatcaacacgtaaattatttacttcaattcctgaatctttagacattgcttccataacatcacgtgtttgataacataaagattctaatgttgcacgaatgaaatgttctttttcagtaccacgagttaatccgaaaatcgcgccacgtgcttcagaatcccaatatggtgtaccaagacctacgaatgcaggaacaaagtagacattatcagtagaattaacacgtgttgcatagttttcagtttgcggtgcagaattaataattcttaaaccgtcacgtaaccattgaattgctgatccagatacgaaaattgatccttcaagggcataatttactttaccgtcaagaccataagcaattgtagttaacaatccactttcagacgttacaggttcttcaccagtattcattaacatgaatccgccagtaccatacgtatttttcacatcaccacgttcgaaacaagcttgaccaaataatgctgcttgttggtcaccagcaataccagcaattggtacttcttgaccaaagaagtgataatctttagtatgtgcataaacttcactagattctttaacttctggaagtattgctttaggaatgtctagtaattctaataattcatcatcccatttaagttcatgaatgttatacattaatgtacgactggcatttgaatagtctgtaatatgtgcttctccaccagatagtttccacactaaccaagtatcgatagttccgaataataaatccccattttcggctttctctcttgcacctttaacattatctaatatccatcttacttttgttccagaaaagtaagggtctaataataaacctgttttattacgaaatgttttttcgtggccttgttcttttaattcattacaaatatgttgtgtttgacgagattgccaaacaattgcatgataaattgggcgacctgttttcttatcccaaatgaccgtagtttcacgttggttagtaataccaatacctttaatttgttcaggatcaatttcattttcatttatcacttcagccattactgctaatactgatgtccaaatttcattagcgtcatgctctacccaaccagatttaggaaaatattgtttaaattctctttgcgcaacgccttgaatttgtccttctttatcaaataaaattgctctagagctagttgtgccctggtctattgacatgatgtattgttccataatttttctccttctttcattctgactgtatgtgttaagtatcctttgaatcacatagtcaatatattatatgatttaaaactaaaatttttcttttaataaatcgattcaatatctttatgtttatttgatttattaagcgctaaaccaatcagtaatgtaacaatcaaaactacaatgctaacaccactcataaaagtaaattcatttttataaaaaacctgataaatcacagcacctatcataccgccagcaattggccctagtactggtacaatagcataccaccaatttgatccgcctttaccagcaattggtaaaattgcatgtgcaattcttggtcctaagtcacgagctggattaatggcataacctgtaggtccacctaaacttaaacctattgcaataattaaactacccacaattaatggatttaatccatctgcaattttatttaccccaataaataaaatccctaaacttaaaatagctgtgccaataatttcacttaaaaagttagcaaaataatttttaatagcaggtgcagtagagaatacgcctaattttgcaccttgctctgtagttgctttccaatgtggtaaatacattaaccaaacaagtgtagctcctacaattcctcctagcatttgacaaacaatatatcctggtacttttacccaactaaaacttccctcaactgctaaagcaattgtcacagctgggtttaaatgagctccagaaaactgtcctactgcataaactcccatagttacagctaagccccatccagcggcaataacgatccaatcagattcttgtccagcgctacgttttaaatttacatttgcacatacgcctccaccgaacaaaataagaatgaccgtgcctaaaaactctgctaaataagcattcatgttttaacctcctacaagacaaaaagacttctacaaactataatataattaagcttgcagaaatctcttcatctctcattcaaatattaacttgtataaatcatacaaaataattgtaagcgttgtcaatagattttgtaaaaaagttgtcacaatttattttgtagattaaaataacgtactataatttttttttagtaatacataaaaaacctgagacctcaatttttgtctcaggttaaaaagataatttctaccacaattttctattacttgtggttacatagcttgcaccactattaatcgcatcattcacttctttttcttcttcgattaacccacctgctataattttagcacccgttgcttctcttacattttcaacaattttatgagcaatacctggtagtacttcaacataatctgggtccactttctttatgagttgtatactacgattgagtgcttgactatcaataataaaaactctaaaaatagtaagtacatttaatgattttgctttttgaatgacttttgtttttgttgaaacaatcccttttggtttataagtttgaatgatatattcacatgcatattcatcatgtgccattcctttaattaaatcaatatgaatatatgcttcaatgtcatgttttttaagtaactctataatgcttcttaaatgacctacatgcatatctaaaaggacacacactttataatccgtttgagttaatttctctaaatctttcatatttcgaattgctggtagtacgtgttctttcatttctatgcatcccttctacattactcgtttaaataatttttctaattcataatttgaaaagttaataataattggtctaccatgaggacaagtaaatggatcttccgcttctcttaattgatcaattaaatctgccatttcattctttttcaagtaatgatttgctttaattgacttcttacaactcatcataatagctgcgtcttcgcgcatttttttaacgtcaatttttttatgatttaatactagttcaatcatatctttaataatttcctctgcttctactttaggaaaccatactggataactatttacaatataatcatatccaccaaaatgttctaaatgaactcctactttatcaagttcttctcgatattgatcaataattaattgttcgtcttttgagaaatgaaatgttaaaggaattaacaaatcttgtacttcatttgatacttcgcctatcttttctctgaaatattcgtatttaatacgttcttgagcagcatgttgatctatcataaacattccattttcattttgagcaataatataggtaccgtgtacttgaccaactacctccatatatggcacacgtcgagacggtgttgaacttactttacctttaatatcttgttctttttgatttgtaacattctcttgaaagtcttcattttcatcataattataaatattggtttcatcatgtcgagtgttatcgattgaagactcagcacgatctaaactatttaaaatatctttttgaatgtcgaagtaatctttatccatactacgtttattattatagacactagaatgttcgttatcttctctagtgtaagaatcatcagaggtatgttcttcatcatattgagaacttattgttgaaaaggtattgttagtcgaaacgttggggtcatttttattttctaattgttttattttatttgaaatattttgttgtttttgttcaaaatcgattttttgctgttcaaacgtatgcaatactttattttttttaggtgttcgatctaaatcatttttaggaattaatattctatctttaaatgcatgtctaattttttcaataattaaattataaagttgttcttcttttgaaagtctaacttcaagtttcgttggatgcacattgacatctactaaaattggatccatttctatattgatatagcaaataggataacgacctatggttagaagtgtatgatatccttcagtaatagctttatttaaagcgaaatttttgatatatcgaccattaataaaaattgaaatataatgtttattactacgagaatgttccggtttagcaacaaatccttctaaatgatagtcactcgtatcgccagaaatgtgaactaaatcttttgcaactttaataccatatatttcagccatcacttcatttgttcttccagagccattcgtttttaacatcgtttttccatcagatataagtgaaaaacgaatatttggatgactcattgccattcgattaacaatatctgtaatttttcctaattctgtatataaacttttaatatattttaaccgagctggcgtattataaaataatgattctactttaatatctgttccttttttggcttttgctggtttttgagataatatttcaccattttcagcataaatttcgtgaccattttcattatctgtacacgttttaagtgtcactttagctacagatgaaatactagccagtgcttcacctcgaaatcctaatgttctgatatgaaacaaatcgtcatcatcatttattttactggtagcatgacgatgaaaaacaagttgcaaatcatcttgctcaattccagttccattatcgactacacgaattgaggaaatacctgattgttctacttctatattaatttcagtcgccttagcatcaattgcattttcaagtagttcttttactactgaactaggacgttcaaccacttcacctgcagcaattttatttgctaaagatgtttgtaattctttaattttacccatgaattaacacctctatcttaactgattttgtaattcgcttaacttaagtaatgcttcaataggtgtcatatttgaaatatttaaatttttaatttgtgcctctatttcactttgtgtttcattcgaattaaataagtcaaaacttgtttgttcaaacacatctgtttgtttaatagttgagtgttcttccttattaattaaatgatccttattttcaatatctttagagttgtcattatactgtttacgattgacattctcatctgataatccattttgttcaaacgcatttaaaataacttgagctctttcaattactttctcaggaagatttgctagtttagcaacttgaataccataactatcatcaacggcaccttctttaactttatgaaggaaaataagttcaccttgatactcatctgctgctacatgtacatttttcaaactagatagctgttgatctaatgttgttaattcatgataatgagttgaaaaaagtgtcttagcatgtgatgtttcagctacatattcaatcatagcttgcgctaaagataagccatcatatgttgacgttcctcgcccgatttcatcaaagatgattaaactatctgctgttgcgtatgttaatgctttttgtgcttctagcatttcaaccataaaggtacttttaccggatactaaatcatctgctgcaccaattcttgtaaaaatttgatcaaaaataggtaatattgcattatcacatggtacataagctcccatttgtgccatgatactaatgattgctacttgacgcatataagttgatttaccagacatatttgggccagtaatcaagtaaataaagttattttgatcaagataacaatcatttggtacataatcattataatccatcacgcgttctacaacgggatgtctagaattttctaagttcaatgtcttatcatcactaaattctggtctaacatagttatatttttgtgcaatttctgcaaaactttgtaaacaatcaagctctgatatcacttttgcttgtctttgtaatctttcagtatatgatttaacatgctctctcaatcgaataaacagttgatattctaattcaattgctttatcttctgcacctaaaataatatcttctttttcttttaattcgtctgtaataaatctttctgcattagataaagtttgtttacgatgatagtcatgctcgcttggttcgaatccttgaagattagcacgtgtgatttcaataaagtaaccaaaaactttattgtagctaatttttaaagatttgatacctgttctttcacgttctttcgcttgaagttgtgctagccaatcttttccatttttagatgcttctaaatactcatctagttgtttactgaatccttgtttgaacagtcccccatctttgactgaaataggtggttcttctactaaactatcttccaaaactttcagtaaatcttctaatggttctaatgtgctaaactgcgttgttgtcacattatccatttgttcaagaagtgatttaatatttggaatttcagaaatagaatgtttgagttgaatcaaatctcgagcatttacatttccataacttactcgtcctactaatctttcaatatcgtatacttgattaaggtaacctcttaaagtatctctttctataaaatgatcaataaatgattctacgatatctaatcgttgttcaatattatctttatgaataagtgggcgatcaatccactgtttcaagcgtcttgcacccataggtgtttttgtttcatccattaaccataataatgttccttttttactttttaaacgtatgctttcagtaagctctaaattgcgttttgcataataatccattttcataaagtcaatcgctgcataagttatcacatcttcaatatgagataaatctcttttttgagtatgatgaatataatctaacaataattgtgttgtcaaaaacattaaattattttctaatgtattaacactatattctatatcagaaatttcttctctaactgtaatcgtttcagtagtaagtgaaatttgtttttttaaatcttcatttatgtcttctcgtactacaatttcatttgggttaatcgtaatgatttcattaattaacgtgctttcatcttcaaaattggtagcttttaattcaccagtagaaacatcacaataacttaatgcgtatccattttcattctgaatgaaactaagaatataattattttgattttcatccattccgccttgttccatcattgttccaggcgtgactactttaactacttctcttttaaccatgcctttagtttgttttggatcttccatctgttcacaaatagcaactttatatccattgttaatgagtgtttcaatatagctatttgctgagtgatacggaacgccacacattggaattggattttcttttttagcatctcttttagttaaggtaatttctaatactctagatgcttctttagcatcttcaaagaacatttcataaaaatcgcctaatctaaaaaacaataagcaatcttgatattgagattttatttttaaatattgttgcatcataggtgtcacattagccatattttttcacaaccttactgatatatacttttttcttctcacattttaacttgtatattttaacatatgtcatactgaagcgctcgttatccaaattagaatattattctacaacttaaaaataaaagattatcatctctttactacgcttaataagcactaaacttattaagtgtatgaaatgataatcttaaataaaataattatttgaatttatctaataatcctcgtttttttaacactataagtaagatataactaatcgctgcaccaagaaaacttgaaactacaaatacaagcattaatggtttgataaagaaatgttgcaaacctaatatccaagatagtggaatgcacattaaactaccaatgattccagttccaatcacttctccaactgcagccataaatatgtgctttctatacatatagaagaggctagctagaaacacaccaatcatactaccaggaaaggcaaaagcactgccagttccaaatgttattcttattaaagaagaaatcaaagcctgtgctaaaccataccatggccctacaaaaaccgcacatagtacatttacaaaatgttgtactggggctgcttttactggacctaaaggtataataataaaactactaaatacgacattaaaagcaatgagtaaagctgtaatggtaagttttttagttttcatctttgaatattcccttctgtttatgagtcgtgatgtgctttttcattatgattatttaaactttgttccatagtagaaaccatcaattgcaacaactcatttgcttcaaattgcgctgaccgaaattcttcaacaataggtaatgcattgatttctttttcaagttgagaaatttcttcttcagatttttgataagcctgatgcttgccataattttgaaaatttactgactgtttttgttgcaattttaattgtttcattttttgttcaattgatgtattctcatgaatttgttgctctacattttgatattgtttaatcaattctagtgcctttattttgttcgatacactatttgcttgctttagaatatcttctttttcatacatattaattagtcaccataacttgattatgaaaatgtaaaaattcaccatttagtgagtattgttttgcttctttaactttaacatcaacaagttgaccaatagcttcacgaggtcctttaaagttaactaatttatttttttcagtataacctgctagaactgtttcatcttttttacttgttccttcacataaaacagtaacaacttgtccttcataattttgcattgctttttctgaatattgaccaacttttttatttaaacgttgcaagcgatcttttttcacttcagttggaacattatctttcattttagcagcaggcgtaccgtctctttgtgaatacaaatacgtataagcatgttcaaattgaacttcatcgtataatgaaagtgtttcttcaaattgttcttctgtttcgttaggatatcctactattatgtcagtagtaagagcgacattaggaatagcttctttaattctatcaactaaatccaagtaactttcacgtgaatatttacgtcccattatttttaatacagcattatttccagattgcacaggtaaatgaatgtgaggaacgatatttccaccttttgcaatcacttcaatcattctatctgtaaaatcccaaggatgactcgttgtaaaacgtacacgtggaatgtcaattttagaaatatcctctaataaatcacctaagccataatctaaatctttaatatcttttccatatgaattaacattttgtcctagaagtgtaatttctttataaccttcacgagcgagttctcgaacttcttcaatgatatcttgtggtctacgactgcgttcttttcctcgtgtaaaaggtacaatacagtatgtacagaatttatcacatccatacataatattaacccatgcttttgtacttccttcacgcactttaggtaggttttcaataacgtcgccttctttagaccaaacctcaacgaccatggcttttgataaatatgcttcttctaaaatttcaagtaatttatgtatgttatgcgttccaaaaatcatatccacattttgatatgattttaaaattttatttacaacggattcttcttgtgacatacaaccgcatacaccaattaacgtttcaggtctatttttctttaaatgttttaaattacctatttcactaaatactttattttcagcattttcacgaatagcacatgtattaattaatataacgtccgcttcattaatatcatcagttgcttgatagtctaaagcttgcaaaattcctgccattacttcagtatcatgtgcattcatttgacacccatatgttttaattaaaaatgttcgtccttttcccatacctttatatttatcttcaatatgaaaatctcgattatattgaacatcttgtttaccacgtttttttgcttctttaagattaggtggttgataaacatgttcgaaatatttactatagtctttttctgcttttttattacgttcgtctaaaatatctatcgtaccagcttttctttgctcttcgttcactttacaaaaatcctttctatatgccctaatattattagtacattatattaaaattagcattaaagtgcaaaaagaggttaaaaattaatatattttattattaaatattgaataaaaagtggaatagatgtcatattgaatcttactccactttaactaaacgttatttaactttaaaatatgttatgcttcgtcatatttaccagttagagtttcaatagatataccttctggcacatgataaaacttcacttggctaataatactaggacattctaattcaaccattctttcattcaatttttgaattaaaattaagcattcactcatatcaccttggacagtcgtttcaagaggacctactctgtaatgtagtcccgactgatcaataattttaatcgcttcatctacataaggaataacatcatcattattaggtgttttaggaactatttgtacactcattaacgtatcttgcataaatttcacctctatgatttatttatgattttattttatcatgattatctttataaatctgagttattctatattttctattgcagattttatagcttttgcaaagtcgcacattaatttatcccaatttgactgattttctctactatttcgatttgttttattatttttgaaaaaagttttacgtaatgaggtagttaactcaatttgtacgcccatacctctagtcgtacaattaacaatattattatcctgttgacctgaaatatggcttggtgcttcacttgcttttataccaatattatttaattgttctttgatgagtgattttagacgttcgtctttcccaccaacataagcaatgctctcgttcccttcacaaccatgaatagcaatagcttggttactttcagttaccaaattcattgcatctttattatcataacgtgtagaagttacgtgcaactctttatttcctttactacgtaaaccttcgaaagtaaagtaattatatccgccttcatcagcaattatacttgctaattcagttgtagcgggttcaatgcctccaccatgaattgctagtattgaaacgctgctatttcggtttttagttattattttccagtcttcattttcaatcgtttctttttccaattcttgcattgatttaaatttatccaacatttccactccttttatttactatattattttcttccctaataaaaataaataaatgaagtttaacaagatttttataaatttaaacttaaattaaaagacattcttgaagtcatatgatgctttcaagaatgtctttaaaaaaattatacaaattgagcagttaagtcattaaactcttgctcagaaatatggatatctcttttagttaatgcactttcatctaattcttcaatttgtgattcatatgaaggtgttgttgtgtcttgatatacaatacctttaactagtgattcatgttctaatacagttttcatcgctaattgtttatctgttggatcataattttcaatatcttcaatactagttaagtgttctttaaaccaatcatacgtattcactttattatatgtcacacatggagaaaacacatttacaaatgaaaaaccatcatgattaattgcatcttcaattaattttgtcaatgctttaatatcacttgaaaaaccttgtgctacaaatgtagcacctgatgatagtgctagttctaatggcgcaacatttttttctatatttcctttaggtgttgatttagttacaaatccaacagcagaagatggagacgtttgacctttagttaggccataaatttggttatccataacaatataagtaatattcatattgcggcgtaatgcatgaattgtatgacccatgccaatagcataaccatcaccgtcgccacctgaagcaatgactgttaaatctttattagccattttcactccttgggcaagaggtaatgcacgcccatgaataccatgtaccccataagagttaatatagcctgataaacgacctgaacaacctattcccgtaattaatgccacttcttcaggttctaaacctaaatttgctgctgctttttgaattgcagcttgtactgaaaagtctccacatcctgggcaccagtttggcttcacactgtttctaaaatctttaaatgtagccaattacatcatctccttcatatctttagctactgaaagtcctttttcttctatttcatgtggtaaaaaaggtgtaccatcatatttagtttgattaactaatttgtcttgaatggcagtattcatttttaagatatttgataattggccttgatagttatgctcagctactatgacgcttgaagctttatcaatagcttgttgaataatatcttttggtaatgggtgaagttgacgaatttgcatcgtattaactttaataccattattatttaatcgtttacttccttcttcaattgcacctttacttgaaataaatccgatatataaaatatctgctttctcatgtttctcatcataatcaacaggtgtttcaataagtaaattcgcagttttactcatacgtttttccatttgttcacgtctgttatcagcagcttcacttggcttgccttcttgattatgttcaacaccagtaacatggtgaataccacctttaacaccaggaattggacgttgtgaaattccagatgttgtaagtgcataacgtttaaagtatgatttatcatcttcatcacgttcaatatctgattgaataagctctccacgtttaatttgaattctattgtaatcgagttgttttactgtttgtttacctaatgacaattgcaaatcgcttaatacgataaccggacattgatattcttcagctaaattaaaagcttccatagttaaataaaaagcatcttcagcatcagttggtgctactactatcttaggaatatctccatgtgttccatatatcatttgcattaaatctgattgttcttgttttgtaggtaatccagttgaaggacctccacgttgcgtgttaacaataactagtggtgtttcagtcatacctgataaaccaatggcttccatcattaaagataaacctggccctgcactcgcagtaaatgctctaactcctgcatagttcgcaccaattgccatattcgctgcagcaatttcatcttcagtttgtactacagtacctcctacttttggaacatttgcaatcatatactccataatttctgaagcgggcgtaattggataagctgccataaatcttgaaccagctgaaatcgcgcctaatccaattgcatcgttaccaatcatgtataaatgtggtgtgccctcactatcttctagtaaaaaatcaccatttactgtatctaatttatccttcatcaactcataaccctgatgaagcgcttctatattcatttcaacaactttttgaccttttttagtaaacatatttgtaattaacgtttcgaaaggtgttgtatctaatttcattactgcacaagttgcaccaatcgctaccatatttttcatcagtgcagtacctaattctttagctgttaatgttaacggtaattcaataagttgcgcacgacaatcatctggtttagaaggtttagctttagcatctgcaataataatactatcttctctcatttcatgatgatttaattcaattgtctcttgatcaaatgcaactaaaatatctaaatcatcactaattgcatgaattggagaagttgagactcttattttattatttgtatgaccgcctttaattcggcttgagaaatgtcgatatccatataaataataaccttttcgattcattgcagtagcaaatagttctcctgttgactcaataccttcaccttgttgtccgcccactttccatgatatttgtggtttcatatcattagcctcctgtggaattaattcatactaaatcataacaaaaataaccaccgtcttactatgtcaacagtggcttttatttaaattcatactaatggactatacgctatttatcaaaaggatgatcctcattgattaaaatgcgttctatgagtttggttcttccatttttatctaaatctataataacacctgaaagtacacttctaccattatcaggcactacatgtcgttgtggcaaacttgtaataaaacgcttaataacttcctcgcgattaatccctagtattccatcataataaccagtcatacctacatctgtaatatagcctgtaccattgggcaaaatacgctcatcagatgtttgaatatgagtatgtgtgcctacaatagcactgactcttccatctaaataccaacccattgcatttttttctgaagtagtttctgcatgaaaatctacaaaaatataattagtttcttttttagcttcttcaatcaattgatctgcttttttaaaaggatcatcaatatcttgcataaatgaacgtccttgcaagttaatgatggcaactttaatatcattaacctgaataaaacgcatgccaacacctggcgcttcactcggaaaattagcaggtcttatcattcttttagcatcatcaataaagtcataaatctctctttgaccataagtatgattccccattgtcataaaatccacgccatctctaagcaattgtttatataatttttcagttaaaccttttccatgagcagcattttctgcattaacaatgctcaacgtaggcttataagcttgctttaatttaggcaaatattcagcaatggcatttctacctacttttcctacgatatctccaataaataaaattcgcattaatgttcatcctctcacaatatagtgtaattgaaataactatataattaaaggtagagtttcatattttttaaaattacacagtcttaactttagcatgcatacagcatatgttattataatattataaaaatttaggagttgtataattagatgtcaattaatatcgatccagaaaaatttgcagaactagttgtaaaagcaaacccatcaaaatcagaagatgcagaagatatggctaaagaaagcttagaattatatattaacgcataccgtttagcagaaagatattctaatattgctacaaattgttatgatacagctgaaattctttctgaaatcaaaaaaacagatttacaacttaaataatgaaaaaacctgagacattttaaatatgtctcaggttttttagtaatcagtgagttcctatttaatttttaaaattacttcgcatactctactgctctagtctctctaacaactgtcactttaatatgtcctggatattgtaattcttcttcaatttgattttttatatctctagctaatcggtaagattttaaatcatctatttcttcaggagaaacaataactctaatctctctaccagcttgaattgcgaacgctttttcaacaccttcataactttctgaaagagtttctaagcgttctaatctacgaatataattttcaagtgtttctttacgtgctcctggacgtgcggccgataatgcatctgcagctgctactagaattgaaataatagatgttggttcaacatctccatgatgtgaatgaatcgcattaattacagtttcaacttcaccatattttttagctaattcaacaccaatttcaacatggctaccttcaacttcatgatcaattgctttacctacatcatgtagtaatccagctctttttgctaaactaacatcctcgcctaattcagcagctaacattccagaaagatgtgcgacttccatagaatgttttaagacattttggccgtaacttgttctatagtttaaacgacctaaaattttcactaaatctggatgcatattgtgaacattgatttcaaatgttgcttgttcacctgcatccctaatgatgtcatctacttcttttctagctttgtctaccatttcttcgatacgacctggatgaattcttccatcagagactaaattcactaatgcagtcctagcgatttcacgtctaataggatcaaatcctgataaaatcactgcttcaggagtatcatcaataatcaagtcgatacctgttaacgtttctaaagtacgaatatttctaccttctctaccaataattcgacctttcatctcatcatttggtaaattaactactgaaacagtagattccgttgtatgatcagcagctaatctttgtacagtagtagctaacaattcttttgctgttttgttaactttttcttttgcttctctttccttttccttaacaagtactgcaatatcttgtgacagttcttcttccactctatgaagttgttcattaactgcttcctcttgagtgagaccggagatgcgttctaattcttgttcatgcttcattattaacgtctgaacactactctcttttgcatctacttgttgttgtctttcttcaattttggattctttttgatctaaaatctcatcttttttatccaataattctgatttacgatctaaattttcctctttttgaagatttcgggcttcttgtctttgaagctcactacgtctttcacgtagctctgtttcaacttgttctctaataatttgattttcttcttttgcctctaataatttctcttttttgatattatctgcttctttttgtccttgtttgataatatcattagcagtttgtctagcttgaatttgcttttgatgtaatatatttcgggctaaaaaataccctacaacaacccctagaataatccccagcaaaatgagtaggaggtctaataaattcacataaacacctcctttttctaggtatttgcttgtatattaaaatctctatgattttttataaattgtataaataatatacatattaattgtacgtttaggtactcagtagtgtcaagatatgaaatttcactacacctacttataaaagaaagagagtgacattgaattcatttcgaactcattattcactctcacacaaaataattttaatatttttaaatatatattaaaagtatattctatttaaagcattaaaaattcaacattattcttcatcgaataatgtttgtgatgatttatcttcattttcttcaacatcaccatcgaaaatgcctaatttttcacgtaatttgcgatcgatttcatctttaatttgagggttttctttaagatatgttttaacattttccttaccttgacccattctctcaccattatatgagtaccaagcgccagatttatcgacaatatcattttctacacctaagtcaattaattctccctcttttgaaataccttgaccatacatgatatctacttcagcaattctaaatggtggtgctactttatttttaacaactttaattttagttctgttacctacaatgtcttgaccttgttttaattgttctgcacgacgcacttctaaacgtactgaactatagaattttaaggctctaccacctggtgtagtttctgggttaccaaacattactccaactttttcacgaatttggttaataaatatagcagtagtatttgattttgaaattgcacctgaaagtttacgtaaagcctgagacattaaacgtgcttgaagaccaacatgtgtatctcccatttcaccttcaatttcagctttaggagtcaaagcagcaactgagtctacaacaacaatgtcaacagctccacttcttacgaaagcttctgctatctctaaaccttgctcaccatggtcaggttgagaaagatataaattatctatatcaacacctaatgcttcagcatatactggatcaagtgcatgttcagcatcgataaacgcagcaacgcctccatttttttgcacttcggcaatagcatgaagtgctactgttgttttaccggaactttcaggaccatatatttcaataattcttcctttaggataaccacctacacctagtgcattatctaaagtaactgaaccacttgatacactagatacacgacgacctttattatcgcctaatttcattactgcacctttaccaaaggatttttccatattttttataactgtatctaaagctttttgacgatcattatccaaagcgaaacctcctatatgagatagttatctatttaatattatatatatattatactcttaactatattcaaacacaagcgttttgcgaatatttgttcgcataaaaagagaacgctatccgaaaaatcgaacaaatgtgccctgaaattataactattttttaatttaagtacattttagtgccaatttaataatcttattaatacataattttgacttctgttgggcagtatatttcttgattgcgttatcttaaatgtagtcattttaaaatcatcttttgtattaattgctagataaacattctctttctcatgtaatattgctatacccatttcagttttatataaatcttttacatatgatgcagcgtctcttaattgcatttcaatacttgaatgatgatttaaaaatatgtcattatctggtaatattccttttaatatattttgtttatcaaagcgttttaaacgagtataaatcgctccatcagttactccgtcatatatacttactgtagaattcatttgttccattacagattgttctaacaatgtgtcatctgaaccataataaaattgaccaattcgttctagaatttcttcttttataggttgaatcaatgttttacattcgctttgtgtagaagcatttgctgttaatctaatatatacttcatgtttccctgctaacggagctatcgtaggattcgtttgtttttcaattaaatccataagttctgtttcaactttcgattctccaattcctgcaaatctaagttgctctgaaaaaatagtattgtcattatctataagtaatggaagcaactcatttttagccataggttgcatttcactcggaggaccaggtaacagaattacttttttatcattcatttcaataaacatgtctggagccataccataatgattttttaacactttcgctccctctatcacaagtgcttgttgtttattattaggtgtcatttcttgcccttgttctttgaaaaaaccttcaatataatttaatgcttcttcattagtcactaagtttttatttaatacttttgctactgtttgtttagttaaatcgtctttagttggacccaatccacccgtgagcactagtgtgtcaaatctttttagtccttctctaataataaattctaaacgatcaggattatcaccaataactgtatgttcaactatattctttccaatttgattgaaaagttttgataaatattggccatttgtatttgctatttggcctaataataattctgaacctactgctatgatagatgtattcatatgcccctctcccttatttagtcttaattcatattttatacttaatctattatataatctaaaaaataactcaaaaaaatgagagtcattttatgcgactctcattacatttcactttatttgattatactttttattgcttaaacacatctctacctttatagaaatattcaattcctgataatattgtaaagaatacgccaatatataataatacttgtcctaattgaaatccaatccaatttgagaataaatcaccaagtaaaatccaaataattgctaccattgtaacagctgttttaattttacctaattggcctgctgcactcacaaacccttgttcaatttgaagtaaacgtaaacctgtaaccgcaaactcacgagcaatgataattattgctacaactgaattagttagccctaattgaaccataacaataagagcactagaaactaataatttatccgctaatggatctaaaaacttacccatatttgtcacaagttgccattttcttgctaaataaccatctaaaaaatcacttaaagaagctacaataaaaataatagcagcaataagttgctctattcttatgtcatagccacctaatacagatacatttccaaaaccaaagtttactagagcaaataatataaatactggaatcaaaatcactctaaaaactgtaatctggttaggtatattcattttaatacctcatttcttaatttatatgtaaattatattaataatactgctaacacccatataattaaagtaataattataacaatactaatcataatcaataattgaataggttctttatttttagtacgatattcgggcacttcgttgtgtcgataatgatgtaaaagtgtatcgagttgattgtggtgattaggaatttcttcatgatgcactttaatgagttgatttacatccatattaactacacttgcataacgtctaataaatccttcagcgtaatccactttggcaagttgatcaaatttattctcttcaatatattttaacgtttctcgctttaattgtgtacgttgttctaattctgttaatgtcattcctaatctttctcttctaccttttaaggtttcaccaattgttttcacgtttgacgcctccacccttattactcaaaaaaaccgaagccaccgccaaacacatcttctccaaaatctaatgtgtttttgcttttaattgcttgttgtttaacttgttgtttcatatgatcatattcaattttttgattctcatgttcacgtagctcgataatataatcaaaatcatcgatgctatattgatttgtttctataaataaatctggatgctcaactacttttattgatggtaaagtcatcacttcttccactaactgttgatgtttaggatttgtttctctagcagttactgcaccatcaataatataaacatgattagcatcatattcaccttttataagagaactacgaactgtctgtttaattaatgttgaacttataaatagccatcgtttatgcgcacagacactacctgcaacaatcgattctgtttttccaacacgaggcatccctctaatacctattaatttatgaccatcttctttaaataactctgctaaaaagtcgacaagtaaacctaaatcttcacgttcaaaacgaaatgtttttttgtcacctgcatcttgttcaatatagcgaccatgacgcactgctaaacgatcacgtaactctggaattcttaactttgttatttctatttctttcaattcatgaataatattttcaaaacgtgtgactttttcaagactatctgtcttaataagtaatccacgacgcccttgatcaacaccatttatagtaataatactaattcctaacataccaagtaaactcgatacgtctcctaaaagtccagctcgattaacaattatctcgtattctaaataccattccttttttttagcgacagtcatctaaccaccccttgtttaaatacaatttgaaatattccccttatataattaaatttattatatcattgattataaaaaacgaatcgtcaaatctgcatttaaaatttaggatactttttaaatataccaaccaccattaaccttttggactgttcctgtaatactcttagcattaggatggcataaataagcgcacacgtgtgctacttcttgtggagctatcattctttgttgtggtagttcagataagataactgctttgtcttcatcactgaatgctttagccatacgtcctgaaacaaaaccaggtgctatagcattcacagtgacattcgtcaatgctagctcttgactgagggcctttacaaatccaatttgagcacttttcattgctgaataaatagtttccatacttgctcccgtctcgccccaaattgatgagataacaataattctaccatttgtactttttctcaatatgtctatgaaatatcgacagcatcgaattaactgtttaacatgaatatgataacattcatctatctctttatctttcatatcttgtaacatcccatataatgatgtaccactactataaattaaacagtctaaatgttttatatgactaaatatatcattaaaatcaatatcatgagtcaaatccatttgaataaattctacggcttcacctttatactttttttctaaggatgagatatcagattgataatattgaagtattacttcatatctatcttttaataaacgatctacaatcgcactaccaatactacctgaaccaccaaatactaatgctttcatatttaatctatctccaaacggctatcaacaagacggtcaatatttagatattgtttggcagtttcattaatactatctaaagtgatattctctacaatatctaacatatcaaatacacttacgccctcaaaatacaattttgcatattgatttgcaatatattctggggaattcaaactagagataaattcaccaataaactgcttcttcaataattcaaacgcttctgaatcttttaagtttcctctatatttctttaattcagtaagtaatctatcctttaattgatctggtttatgagtagcacttgtaataattgagaaactataagtaggttcaagaacaaattgatatccaaatgaatcatcaattaaatcatcattaagaagagattgatagaaatctgtttcttcaccgaatacgagttcaaaaaataaagtcatttctaaatctttttgaacatatttctcaggtgcttcattcaaaggttcatttttaaatcctaacattaaacgtggagactgtaatttcattttttcagatacaaatgattgaactacttcatttggttcttttattgctcctctttggatagaaggttgatttgttttatgacgacgattttcatgttcttcaataacattacaaatacgtttaggatccacatctcctacgacaaataacaccatattagatggatgataaaacgtttcataacataagtataaatcatctttagtaatactataaatactctcaacactacctgcaatatctactttaattggatgatgatgatacattgcgcgtaatgtattgaacataattttatatcctggttgttcttgatacattttaatttcttcagcaataattcctttttctttatctactgtttcttttgaaaaatagggtgtttctaccatatcaagtaaacgtagaatattacgttcaacttgatcagttgcactaaacaaataactcgtacgatcaaaacttgtaaatgcattgacttgagcattatcattggcaaatgcagtaaataaatctttatcatcgtctttttcaaataacttatgctctaaaaaatgtgctactccatctggtacagtcacatattgatctttatgatgaggtttaaatgtattatccaacgaaccaaattgagttgtataggtcacatatgttttttgaaatccttttttaggaattacaaataagcgtaatccattatttagttcatgtttatagacgcgttcatcaattaattcataatattgttcttgcactatgattgacctcctttcgttaatacatatatcgtatctaaataggcttggtttgccattttaacgacatcttctttagtcactttattaattaactccatgtattctttatctgattgaggctgattcaaaagtagttgattttgcataacttcaataatacctttaggtctatctgcaatttcttgtcgttgtgaaatgataatttttttagctaatgctaatttttcttcagagaattcccctactttaaacttctcgaattcttcaataattgtgttttttgcagtatcgtatttttcaacagatacaccacttaatacaaataaatagccattttttccatctaattgtgaatgaatagaataagctagactttgtttttcacgtacttcattaaatagtactgaagaaggatcaccgccaaacatagtatttaatacgacaagtgcatagtaatcttcattcccataatgagttggaaaacgataacctaaatttaatttagcttggtcgacggtatctttttcaatgattgtttcagtagattgggcgttacagtcagtatttacattatgattaaagtcaaacgtagttgagctaagactaaatgaattttctataagtgatgtaccttcttttttatttacatttcccactacataaactgaacacatgtcattatttatcatagatttatatgtatcatacaaactttcatttgtaatacgcgcaatattttctatttgacctatagccaaataacgataagcttcacttttgaacatatattttaataaattaataaatgaatattgcgctttattgtcaatcatcgcttctatttttttatgtaataatgatttttcttgagtaacaaatgtagagttgaatgaattgttctcaacaagtggattcatgatgacttcttttaataaatttaaacctttttcaaataatggtgtagtatctttaagataacgttcatttacaatttctaaagaaatagtaatgacatgtttatctttaaatttagaaacaaagctattaatataagccccataaagctctgataattgttgattaaatgatctatctgttggccatttttttgtggcacgaaccaatactttacttagtaatgaacgagcagtaattgtttcgtaatcaagtggtgccataaatttaaatgtgatcatcgttgttttaaatttctcagtcggaagaatatcaatatgtatttgatgattagtatgttgtttcaaaataatcaatcactcctttacctgttattaaatttttgtgcgtgttaatttaaacttcactaggctactttttatataatttaatgaatataaaataggtttacccatttcatcataatgtacaacctttaataacattaatccctcatgtggttcagcattcaatatgctagaaatatgaggttcataactgattgcttcaatttcagtttcagcagaagctaccttatgaccagtattaagttcaattgcattaagcatcgaaccatcactttcttgatattcggtacaagttaaatgatgctcagcaatcttatctaaacaataaataactggttgatgattcgcagtacgtagtctttcaataattgttataggttgtttatcttcaatatctaacatttttgcatccaataaagaagcgggttgttgctctaaacttaaatattctgtacttgcttcatatcccgcttttttaatcatttcactaatactaaataatttatttaaaggataataaaagggacgtagagcctttatacttgttccttcctcaaaattatcagttaaaacttgttcaataataagttctccaatcgcttcatagacatcatctgttttaacgttaacttctctagcaatagataaattgctaggaagtttatcaccaggtttcaaagaatgattttttatttttttaaaaatatattcttttactttaaaaaccgagtttaattcagtcatactcacacctcttcattctcaaaatctattaaaacttgtcttggtttactgcctttttgtggaccaataacattatttctctctaaatcgtccattaatcttgaagcacgattatatccaattctgaattgtctttgtaaaagcgacgtacttgctttttgtttctcaattacaaaagcgtatgcgtcatcatatagtgtatcttcacttttcatttctgatttttctacaggggcgtcaggttccatttcttttacgtaatttgctttttgttgttcaactacataatttacaacttcttgtacttcttgatcacttaaaaatgcaccttgaacacgtgtctgtgtagattcaccattaccaacataaagcatgtcacctttacctaataatttctctgctcctccagagcctatgattgttctagaatctgtttgtgaacttacagcaaatgcaatccttgaaggaatattatttttaataatacccgtgataacatctacagaaggacgttgtgttgctacaattaaatgtatgcccgctgcacgagccatttgtgtaatacgctgtattgcattttcaacttcttttcctgctaccatcattaaatctgctaattcatcaacaatgacaacgatataaggaagttctgattgcttttcatcaagttcttcattttgacgtcttataaattgattgtatccttcaatgtttctagtagacgaatgttgaaataaatcgtaacgacgttccatttcagcaacaattttctctaatgcctgtgatgctttatgaggatttgttactacaggtattaataaatgtggaactccattatatacatttaattctaccattttaggatcaattaacattaattttacctcgtgtggcttagcatttaataaaatgctcgtaataataccgttaatacatactgacttaccactacctgtagaaccagccactaataagtgaggtgtttcattcaattcaatagtcattggttctccggaaatgtctcgtcctaaaccgacttctaatttattttttgctggaaacttagattctaaaacttcttttagcgtaactaaagaaattttatcatttggaacctcaatacctacagctgaacgtccaggtataggcgcttcaatacgaatgtctttcgcagcaagtgctaaagctatatcattatgtaaattaacgattttatttactttaacaccttgagcgggttgaacttcatattgagtgacagccggtccaattttaatttgagtcactttagcattaactccaaaatttttcatggttgattctaatatttgacctttacgttgtacttcagctcttgaagttgtcgtttgttttgttggctgtttaagtaatgataaaggaggaatgtgataggctacattgccaacttctcccgcttctatgattgaactattattcgtatcgttgtcattagagacgtgttttattttatcttttttcatagaatttgatgaagatacatgagtaggttctttatcttgatggtctatgtcaaattgacgttttttacgtttaggtcgtactttttcttcttccgttgctgcatgatgactatatataggaatatctttatgttgttgtttcacttctgggaaatcactcacatctttaatgacttcatctttcctttgttgttcttctaattctctttgatgtgccaatgcttgacgctgttcttctttttcacgtaatcgttcttctcttctaattttatttgcttctcttttttcttttagagtagatgaagcactctgagtagaacgtttaaaataatcaattgtgcttctcgccacatctctatgatgtaattttagtaataagataaaacttgatatcagtaaaatcaaagtcacaatgataatcccagcaatagagattaaaggtacaaataattttaataaataaaaacctataatacctccaccgaaatttggaaaatgagtatgttcataagatttatagacgtaagacaataccggttctcttttcgcaacttctcctttagaaaaataataaatgagttgagaaacaatcagtaatacaaattgtaataaaatgagaccgaacgtacgacgagtttttggaaaatgtctttgcattgcaatataaatcgtaattaaacttactaaaatatatgtaaggtaacgacttgcgccaaataaataattgaaaaagctatcaatcattctaccaacaagccctaattgaaatattcctaaaatagatataatcacaattataatagtaataatataccttatagaactatctgttttttgttgctttttctttttagattggcgtgctttcgttttcgtctttgaattggtttttctagtcgttgtttttttcttagttcgtggcaaatgttacaccttcttttatttttaattataataatgacattttcaaaaatataaaaaaatgtaagttatgttttagagttaaaagtatgaaagaggttgagacaatatatatcacatagactcttaagcccattttaaaatcattaaaaataaatgagtcaaatcatcttttaaatttatagagttcactataaaagttagggtaaatgtcttatcttttatatactttcaatttaatacatcaatgaatctataaataagaatgataaacgtttatatttttaattattttataaaagtgatattgtcccgacctctttattaaatgtatgtctcttaaatttcagaaataactggaataatcattgggcgacgttttgtactttcaaataaaagcttgctaatttggtcgcgcatattttgtttaatttcagaccactcaatgcgtttttcttgtagtccagcttccacaatttctcgaactttatcttccgcttctttcattaattcttcactttcacgtacgtaaacgaatccgcgtgattgaatttcaggtccagcagctatacgtctatttttagggtctaatgttactactgcaataaagataccatcttctgcaagaagatgacgatctcttaacacaatatttccaacgtctcctacacctataccatcgataagaatattacctgaatttactttttcatttaataccatgtgtgagccatcaaaatgaatcacatcacctttttcgacaaggaaaatcttttcaggtgcaacacctgcttcatttgctaattttgcatgagcaatttgcattttaaattcaccttgaacaggaataaagtattcaggtttcataatattaatcatcatttttaattcttccatacaaccatgactagaggcatgaatttttttattatttggaataatatgtgcacctgctcgaacaagttcatttaacgtattggctataataacttccatatttgctgaagcagtgatggctaagtaaactgaatcgccctcttcaatatttaaaattttatgtttatgttgggccatttgacttaacgcttcaataggttcgccttccatacctgttgctataataacgacttcatttttaggataattttcaacttcattgattggaagcaataaatctttaggaatatcaaaatatcccatttttcgtgcagtattaaatgaactttcaagagattttcctaagaaagatactttacgatttaatttactagcaacatttaatacttgttgaattctaataaaattcgatgcatagcatgaaacaattaagcgtccttttactttagcaaatgcatcataaatatgcgattctatgacattttctggagtattataaccaggtttttctgcttcagttgaatcactaatcaaagcaaaaacaccttcttctccgatttcagccatgcgtttcatatcaggagcataatgcccttgtaaactttggtcaaatttaaattcacctgtatatacaattgaaccgtatgaagtatgaatacagatacctaaactatctggaatactatgtgatgtattaaagaaagtaatattgacgtttttaaatctcatcactgaatcatgattcacagtataatatcgtacttttttctttatatttctttttttgatactttctttaactaaagctaaagtaagttttgatccataaattggtgcatcaacttgctctaaaatataactcactgcaccaattgcatgttcatggccatggcttaaaaatatcccttttaatttatctttgttttctactacatattggatgtcaggaataacaatatctactcctaacatctcatcttcaggaaacattaatcccgcatctaacataaacatctcatcgtctacttcgacgatatacatatttttagcgatttcgcctacgcccccaagtggaataatgcgaatatcgtcattctttttctttactaaactcaaaatgttacctcctataattaattcccgtccatataaactcataatttattataatttaatttacgaaggatgtacactattaaagtgtgttgtaactaaggagtaaaagacctttaataaaaaatatatactttcataaaaccattctttatatatataaagaaggttaggacttcattttgtcctaaccttaccttaacttcatccatttattcatctaaaactttatgagacgcatttacacggccttgtttatcaatttctgtaattttaacttcaatcgtatcactgatttttaaaacgtcttcaactttatttattctatctttagaaatttgagaaatgtgtaataaagcatctttacctgggaataattctacaaaagcaccatatttttcaatacgcttaacttttgcatgatatacttgacccacttcagcttcgcgtgtaatttcattaataatttctcgagctctatttatcatttcttgatcaacagcgccaataaagatagtaccatcttgttcaatatctaacttaacgccagtttcgtcaataatttcattaatttttttaccacccggaccaatgacatcacgaattttttcaggtttgatatgcataatttctaccttaggtgcatatgcacttaattcactacgtggttgatcgattgtttgtaacatatgatccataatagctaaacgaccttgacgagcttgttcaagagcttcttcaatcacttcacgtgttaaaccatcaattttgatatccatttgaatcgcagtaataccctctttagttccagcaactttgaagtccatatcacctaaggcatcttccataccttgaatatcagttaaaattgtataactgtcttcacgagtgacaagacccatagcaataccggctactggagctttaataggtacaccagcatccattaacgctaatgttgatccacaaattgaagcttgtgaagatgagccatttgactctaatacttcactcacaatacgaattgtgtaaggaaactctgtagtgtcaggaatgatatatctaagtgctctttcacctagtgcaccgtgaccaatttcacgacgacctggcgctcttactggacccgtttcacctactgagaaattaggaaaattatagtggtgcataaaacgtttttcaatttcaggtcctaatccatcaataagttgatagtctcctaatgctcctaaagtaagtacagataatgcttgagtttgtccacgggtaaacaatccagaaccatgtgcacgtggtaataaaccaacttctgattcaagcggacgaatttcatctggtttacgtccatcaggtctaattttttcatctgcaattaatcgacgaacttcttcttttactaaatcatttaagattgcatatacttcatcgataagcaactcattttctgggtccgcttcgtctacaaattcagtagcgatttctgctttaagtgcatctaaattttcatcacgttgttgtttgtcaaatgttaatacagtttcttttaatcctttttcttccgttaaagattttactcgttgtactaattcttcatcacgttcaacgggaataaattctttttttacaggttgaatatgctcaacaacttcttcttggaaagcaactaagcgttttatctcttcatgaccaaagaaaatcgcttcaagcatttcttgttctgtaatttcactcgcacctgcttcaaccatatttacagcatctttatgaccagcaacttctaaatctaaacgagatacttctttttgttcaagtgttggattaatcacgtatgttccatcaatatatcctacattaacaccggcaattggtccttggaatggaatatcagacacgctcaatgccattgacgatccaatcattgctgccatttctggggagcagtctgggtccgcacttaatacagtattcataatttgaacgtcatgtcgataacctttagggaataatggtctaattggtctatcaattaaacgtgcagtaagtgtcgcttcatctccaggacgaccttcgcgttttttaaatccacctggaattttaccagccgcatacattttttcttcatagttaactgttaaggggaaaaaatcaccatcacgtggctctttagaagcaactgctgtagataatacaacagtatcaccataacgtactaaaactgcaccattagcttgtttcgctaattgacctgtctcaatcgttaacgatcttccagcccattcggttttgaacactttcttttcttgagacattatgaatctcctctctgaaatctaatacttacatcatatcatttatttatatatttttatattagtgtttatgataaaaatacaaaaaaggaaagtaccaatctaaatggtgctttcccttcaatatatttaaaattaacgacgaatacctaatgatttaattaattcacggtaacgttgaatatctttactacgtaagtagtttaataaatgtctacgacgaccaaccatttttaataatccacggcgtgaatggtgatcttttttgtgttcacgtaagtgttcatttaatgcagtgatttctgcagttaaaacagcgatttgtacttctggtgaaccagtatctgtttcgtgtacacgatattctttaataatttcatttttacgttcttgagtaatagccataattaaattcctcctaatttttgtttacaccttaatctgagcaaggcgtcggagtttcaacctgccaagataaaggattcaatagtaataagtttttcaaaaactcaactttaaatattatacgatacatcatcaccaaaatcaactgctaaaagatattttgcacgttctttatcatcattcatttgactgactaaagcatctataccatcaaattttacctctggtcttaaataatggtgccaatatacgattacacgttctccataaatattttcttcaaaatcaaaaatattcacctctatcaccacttctgctttagatggatcgtggaatgtcggcttaacacctacgttagctaccccacgatatattttgtgttcggcacctatttcaatacttaccgcatataccccttttttaggaagtacataatcatcgctaggttggacattagctgttggaaaaccgattgttcgacctcttttttctccttgaacaactgtacctttaattcgatataaataacctaattcatcattagctttttgtagattgccttcatgtaacgcttgtctaattgatgttgttgaaattttttcagaatctaaatctaatttaccgactattgtagtattaaattcatctatttcatttaacacggccatatttcctttaccaaatttaccaaatgtaaaatcaaatcctgcaacaacttctttaacatgattattaataatatagtctttgataaactcttcagctgtgacgttagcaaaacgtgatgagaaattgataacaatacaataatcaatatcatgctgttctatcatttctaatttatcagatagtggcgttacgtaatctgtacgtttacgttcaggatttaatactactgatggatgcggatcaaatgttgttactgccttttttaaatttttttcttttgcacgtatatctaatgcttcaaatactttactgtgaccacgatgcataccgtcaaaaaaaccaaatgccattgcaacatcttcttttatgagttgttcattttgtattggatgtgttatttctatcactttcatatcaatcaaaggctcctttaattaaatacttttttaggctttatttcgttaattttgtcaggatgatgttcataaatggctaatgctttttcacttatcttatcaataaacacaaattgcttttctaatgatagagtaaaatctttttttaggagtttttgaccatttaagattctatactttaaagtgtcatcatcaatgactacatgttgtaaacttttcaaaccatattctataggaaatagataatgttgtaatgtttcatgctcatgtaattcagaaattttttcaagtgataaactctcatttatattaaatccacccgaatttatacgagttaacaacgacatatgagcaggataacctaaagctttgccaatatctgttgctaacgttctgatataggtaccttttccacacgttacttttatatcaaaatgacatgtttgttctataaatgttaaatcagatattcgttcaatttcatcaattttaacttgtcgttttggccgttcaatagtttctccttttctagcatattcatataatttttttccatttacttttacagaggaatacattggaggaatctgctctattactcctttaaattcttctaaaacacgatcaacttctatagaagtaatcgtattcgccgctatatttactttttctattacttctccagtttgatcttcagttgtcgtactttcacctaatgtaatggttgcttcataagatttccccatatccatgacatagtcgctcactcttgttgctgtccctatacagataggtagtacacctgaaacttcaggatctaatgttccagtatgacctatctttttagtttttaagatttttctaagtttaaatacaacatcatgactggttaaaccacgctctttatacactggtaatataccgttgtacattttttcacaccctttagtttattatgtctcactatgtattattaaatcatctaatgtcttatccatgttttatcagtattaatcatataaaaaggagtaggactgaattcatgtaaatgttatcgtcctacccccattatatgttacatctaaatttctttttctgaagttatttgattgaatgtcactgattaataacaatgataaagtattatttatcttgtttgtgtaaatcttgaatcattttttcaattttattactgtattcaattgattcatcatattcaaagaataactctggtactatacgtaatctcattcttgaacctagctcagatttaatgaatccttttgctttatctaaagctttaaacgtatcattaacttcctttttattgccaagcactgttaaaaaaactttggcttgtgataaatcatttgttaattcaacgtcagtaatagtaataaatcctactcttggatctttaactttattattaatgatatccataacttcttttttcatttgttcgccaacacgttcagctctcatattactcatggatatgtcacctctttattatttaacatatatttagaaaagaaggctaaagtggctacctatatcatatacacttcagctctttacaaatgagttatctttcaatttctaccatttcgaatgcttcaataatgtcaccttctttaatgtcattaaagtttgcaattgtaataccacattcgtaaccttgtgatacttctttagcgtcatctttaaaacgttttaacgtatcaagtgcaccttcgaattgaacgataccatcacgaatgacacgtacgcctgcgttacgagtgattttaccttcagttacgtaactaccggcaattgttccaacttttgaaactttgaatgtttgacgtacttcagcttgtccgataacttgttcttcaaattcaggatctaataaacctttcatcgctgattcaatttcttctataacattatagatgactctatgaagacgcatatcaacattttcagcttctgctgcacgtttcgcacctgcatcaggacgtacgttaaatccaacaataataccatttgaggcattagctaatgtaacatctgattcattgattgcccctacagctgtatgaataatacgaacatttacgccttcaacatcaattttcataagagatgcagctaaagcttctacagaaccttgtacatcgcctttaataatgacattaagatctttcatttcgccttgtttcatttgttcgaataaattgtctaatgaaacatttttgctttcttgacgttgttgaatcacatttgcttcatgacgagcttcaccaatacgacgcgcttgtttttcatctttgaaaataacgaagcggtcacctgcttgaggtacatcgttaataccagtaatttcaaccggtgtagaaggcccagctgttttgattctttgacccaaatcatttaccatagctcttacgcgaccatacgtattaccaactacaattgaatcacctacatgcaacgtaccattttgaactaataatgacgcagctggtccacgtgatttatctaattctgcttcaataacagtacctactgcttgcttatcaggattagcttttaattcttgtacttcggcaactaaaccaatcatttctaataagtcatcaataccatcaccatttaatgctgaaagtggtacaaagattgtgtcgccaccccaatcttctggaattaaaccatattcagttaactcttgcatcactcggtctggatttgcagttggtttatcaactttgttgaccgcaacaattgttggtacatccgcttctttagcatggttaattgcttcaattgtttgaggcataacgccatcatctgctgctactactaaaatagtgatatctgttacttgagcaccacgtgcacgcattgttgtgaaagctgcatgtccaggtgtatctaagaaagtaatttttttaccattattttcaatttgatatgcgccaatgtgttgtgtgataccgcctgcttctcctgctgttactttagtatttctaattgagtctagtaatgttgttttaccatggtcaacgtgtcccataattgttacaactgctggtcgttcaattgcatctgggtcgtcttcttcatcatcaacataagttgttaggtcttcttcattaacaacaacttctttttcaatttcaacaccataatcatctgcgataagttctaatgtttcttcatctaatgattggttaatgttagcaacaatacctaataaaaataattttttaataatgtcagatgattcgatatttaatttatcagcaagttctcctactgtaataccttcctcgtacgtgatttttgaaggcatttctttgggttcagcagcaggtttgttattcttaccttttttattatttttgttgtttttattgtttttgctatttttattgttttttttctttgaattagatttgttttgattattatcttttttattttgctgtttttggtgattattttgagtgttttgttttttattttcttcattttttgatgatttgaactttttattaagcatcttaatttggtcatcttctaatgcttgcatgtgattggatacttcaacgtccattttctttaactcatctataatctctttacttttaacatttacttctttcgcatattcgtaaattctctttttactcatataatcactccttacaatattcatcaatcatcgacataagttttttggcaaaacctgaatctgttacgccaacatttacacgttcttctttgcctaatgattgtcctaattctactctcgtaccgaaaactctaaatggaacatgatatgtgtcacatttattctttatattctttttagcgttatctgaagcatcagtagataaaatcacaagcttaatattacgtttttttatttctgatatgagtactgattctccaactttaacttttctagctctcatcgctaagcctaaaaaattaaatatctgttcttttgtcatttaggaatctcttctctataaattaatcgaattacttctttatatacaggatctaatttttcaggactttcattaaaatatttctcgagtacaccatttttttgagcatcttctacgcttttaacatcttttgaaacatatgcacctctaccttgttgttttccagtaccatcagcgaaaatttcgccttctttattaattactactcgaatcatgtcttttttaggacgcatttcattcgtgatgatgcatttgcgcattggaattttcttcttcttcatttactactcaccccacatgcttaaacgtattaatgttcttctttattatctgaagcgtcttgtgcttcatttgaagtttcatcaacttccgctgataattcagttgttgttaagtttgtttcttctaaattgatgtcatcaatttcaatatctttatcttcagaaaatactatttcatcagctttttcttcagattcaattataggataaattcctgcttcgcgagcatctgtttcagatttaatatcaattttccatcctgtcagtttggcagctaagcgcgcattttgtcctcgtttaccaatagctaatgataattgataatcaggtactaccactacagtagattggttatcttcatcaacaataacttctaaaacttgtgatgggcttaaagcattacgtacaaaaacatttggatcttcatcccattgaacaatatcgattttttccccacctaattcttcaacaaccgcttcaacacgtgaaccttttgcacctacacaagctcccactgcatctatatctggattttcagagtatacactaattttagaacgatctcctgcttcacgtgcaactgatttcacaataacagttccatcataaatttctgggacttcttgttcaaataaacgttttaataaacccggatgacttcttgacacataaatttgtggaccttttgttgtttgctctactttattaacatagactttaattctttcatttggaacgtatgtctcattaggacttctttcagcttcagataaaaccgcttcgattctacctaaattaacatacacatatcgatgatcaacacgatcaatcacacctgttaaaatatcttcttctttatcaataaactcagagtataaaatttctctttcagcatctcttagacgttgcattactgcttgtttagcagcctgtgcaccaacacgaccaaagtctttaggtgtgacatcttcttcgtaaatatcacctatttcataagcaggatttttaactaaagcagtgcttaaatcaacttcttcacgatcatcaaatacttcttctacaacttctttacgtgcgatgactttaaatgtgccttcatccatatttaattctacacgaacgtttctagcactatcataatttttcttatatgcagtaattaaagctgcttcaattgcatcaatcaaaacttctcttggaattttcttttccttttctaagtattcagttgctaataataattcattacttgccacaattattcctcctcatcacgttaaatcattacagcgtgacgtgcttttgcaattttatttcttggtatctcaattgtttttttctttgatttttctttaacttccatagttattgtgtcatcatcgacagacttcagaatacctaaccattctttatcaccttcaattggcgcataaagagatacaaatacaggttgctctatcgcattttgataatctttttctttttttagtggacgttcagctccaggtgaagctacatcaagataatacatttcaggaataggatcattttgatccattgcttcacttattttttcagaagcaagcgtacaatcatttaaatctacgccaccttctttatcaatagagattctcaaaaaacgatctttgccttcttttgcatattcaacatcaactaattcaaagtttaaatcatctaaaatgggagtaatgatagtttctacttcttcagtaattttactcatacaggcctccttttttggcaaatagaaaagagcgggtatatgcccactctttctgcctgagtctaaatttttacacaaattaattataacatactttatatgcttaaacaaatgaagctactattaatacatctaagttctccatttacatatcaaaaatggacaactgtgctttatctggtaaatctggtaatgaacctaaatcatcaaggtattcaataattttttgagataaacctgcttttttattaaggtcttctttggataaaaacggcccgtcttcacgtgcctcaacaatacgtttagctacattttcccctaatcctggcacagcaataaatggtgggatcaatgtatcatcttcaataataaaatcaaaagcttgacttttttctaagctaatcggctgcattttaaacccacgatgtgccatttcattcattatttctaatactgttaatacatctttttctttttttcctaaatccatataacgagaatacatatctttaactgtgttcttaatactttctttatctttaatcattgtaattaaatcaaagtctgatgcacgaattgtaaaatatgctgcataatagtataacggatgatgcactttaaagtatgcaatacgtacagccataagtacgtaagcagctgcgtgagctttagggaacatgtatttaatttttaagcatgaatctaaataccaatcaggtacatcattcgctttcatcgcatttatcatttcatccgtaagtcctttacctttacgcacagactccattgttttgaaagccattgaaggttcaagtccagcatacataagatataccataatatcgtcacgacaaccaattacactggataaatcgcagatgcctgagcgaattaactcttgcgcattaccaagccacacatcggtaccatgtgataatcctgaaatttgtacaagttcagaaaatgttgttggcttagtatcttctaacatttgacgaacaaaacctgtaccaaattcaggtacaccaaatgtgcctgtcttacataaaatatcctcttctgttacacctaaagaggccggactactaaatatttgcattgtctccttatcatcaacaggaatcgttttaggatcgatacccgataaatcttgtaacatacgtatcattgtaggatcatcgtgtccaagtatatcaagttttaacacattatcatgaatcgagtggaaatcaaagtgtgttgtcatccaaggtgcactttgatcatctgctggatattgtatcggtgtaaaatcgtaaatatccatataatcaggaactacaataattcctcctggatgctgtccagttgtacgtttaacacctgtacatcctttgacaagtctatcgatttccgcaccacgtttatgaataccttggtcatttagatatcctttaacgaaaccaaatgccgttttttcagccactgtaccaattgtacctgctcggaatactttatcttctccaaaaagtactttcgtatagttatgggcatgcggttgatattcaccactaaagttcaagtcaatatctggcactttatctcctttaaatcctaagaaagtctcaaatggaatatcttgaccttctttaattaattcgccaccacatgtttcacacgttttatcaggtaagtcgaagccagaacctaccgatccatcatcaaaaaattcactcgtcttacaatgtggacatatatagtgtggagggagcggatttacttctgtaatctctgtcattgttgcaacaaagctcgaacctacagaaccacgtgaccctaccaaatatccatcatctaatgattttttaactaaccgttgtgatatgagatagataactgaaaagccattgccaataatactatctaattctttttcgagacgatcaattacaatttgcggtaagtcatcaccatacaatttttttgcatttgtatagcttaattcacgtatttcttcattagcgccctccatacgtggtgtaaataattgatctttaattggaattactttctcaattcggtctgctaattcattcgtatttttaacaacaatatcataggctttatcttctcctaagaaatgaaattcatctaacatttcatctgttgttctaaaatgtgcttctggaagtgtggaacgatttaatggattacctggttgtgatgcaattaaaattttacgagcaatagcatcatgctcaaataggtaatgagcattaccagtagctatcacaggtattcctgtactttctcccgcttttaaaatacgatcatatatttcatacaatgtttcagtatcacgaattaattcacgatcgattaaatcttgataaagtttaggtggttgtacttctataaaatcataatactttgctattttttcaacttcagattgatcacgttgcatcacagctgtaaataattccccttcatcacaagctgtaccaactaaaatgccttctcgatattcatttaataatgatcgtggaattctaggtgttctataataatattttactaaagaagcacttacgattttaaataaattcttaagtccatcttgattttgaactatgagtgtgacatgggttggtcgtgcacgtttataggcatcttcatttgataattttttattaatatctttatgattagccacacctaattctttcatttgttgaaccattttaatgaaaatataagctgttgcttcagtatcataaatcgctctatggtgttgagtgagttcaacgccatattttttagctaagaaatttaacccatgtttaccatattcagtgttaatagtacgtgataattcaagggtatcaatcactccattagttgatggaccaaaacctaatcgttcgtaccctgtatcaataaagcccatatcgaatgaagcattatgcgctacaaaaatcgcatctcctacccattccttaaattctgttagtacttcttcaatttctggtgcatccactagcatgtcatctgtaatgtgtgtcagattaattattgtttctgataatttttcatgtggattactaaatctttcaaatttatctataatttcgccatctttaactttgacagcagcaagttcaataatttgatcatattgattagataaacctgttgtttcgacgtcaaacactacatatgtcgcatcttttaaatttctatcggtaggtttataggcaataggcacgccatcgtcgactaacatgccttccatcccgtaaatcattttaattccatttttttccgctgcactatgagcatcaggaaaagcttgaaccacattatgatcagtaacagctattgctttatgtccccatgctgcagcctgattaacatatgcgctgatgtttggaataccatccatttgactcattgatgaatgtaaatgaaattcgacacgtttctcttctgctttatcttgtttaggtgtctttttgatttcttcaatatctgacatcatcatgactaaatcacggacaaatgtatcttcttctatacgaccttgtgcacgcacccatttacctacacttaaggctttaaagtgatttaaatcatccttattttttctagtaaacatttttaatactaaagaatctgtatagtctgtcactttaagttcaacgatgtgacgtccactttttagttctttaatattaatatcaaagataactccttcaatggctactttaaattcttcttcaataattgtttcaataggtttaatattttcaacgtgaattggctttcctatttgacatttttcaacactactaccgttattatcttgttgttttgctttttcagcttttattttttcaattttttctgtagcttctttagcactttgttgatcttcttcttgaatatgtgcctctaatgaagcaagatcttcatctctattcgaatcgtcagtttcaaatattactttatctatatcaaagccacatttttgaaatgcttttactaaactaccattacatactttatcaaaatgatttctttcaatatcatttgaagtcattatttttaaaacattgcctgacataattaaacgtttttgtttaagttgacccttcacttttggtgataaagctgtgtgttcaatacaatgtccaaaatatttaatcacatgttcatcttgattcgatgtattttgaattgtaaaatgccagtccacatgtgcaatatctttaaactcttctttaattgcatgagtaaagattaaataatcttcatttgaaagaaaataaggtaacgtaatctgaaattcccaacttctatttttatttgatacatctattcgtgtgagttcacctttttcaagtatttctttatccaattgatttgaaatcttaatttgatcggcaagtactctaaatttttcctgacttgtcattgccacaaagaataaccaccttatttcgaacttatcatttactttaaaaaacttgatttatattatactactttcacatttatttttcatgattacagtttaactaataaaaacaataaaagaggttggaaacaacaaaatgttccaaccatttttattcatgtgtacctatagtttttcatagagtgaagcaatgtgattgtctaattcattaatatgaacttcttcactttcacccgtttgacgcactttaacttcaacaatgccttcacttgcatttttacctacaacaattcttatcggtaaaccaattaaatcagcatcattaaatttaacgcctgcacgttctttacgatcatcataaagtacatcatatttagattgcaattctgagtataatttatctcctaattcaagttgttcttcttttttaggattgattgtaattaaatgtaaatcaaatggagtgactgactttggccaaataataccattttcatcattattttgctcaacaatcgcacttaatgttctagacactccgataccatagcaacccataattaaaggttgagctttaccttgattgtctaaaaatttagcattcattgcttcagaatatttcgttccaagtttaaatacttgtccaacttcaataccttctgcaaattttgcatttccagaaccatcacttaatggttcaccttctaaaataaatctaaaatctccgtattcatcgatattaaaatcacgctcaacatttgcattaatatagtgatagccatcttcattagcacctattactatgttatttaaatctttaacaaaattatcagcaataattttaatgtctttattatgaataggtcctaatgaaccaggatttgctccaagtaaatttacaatttcatcttgagtcgccatttccacactatcagtttcaaagtatgctttcaccttcacatcattgagctcatgatgacctcttactaagaacatcatgaattcaccatccactttgaaaatcattgtttttacaatttcatcaattggacgatttaaaaagtcagctaattcttgagctgttttaatatttggtgtttctattttctctagtgatttaatgtctgtatgtttctcattgggataatacttaacttcagctttttcaatgtttgctgcataatcactattttcactatacacaatcgtatcttcaccaatttcacttaaagccataaattcatgtgtatgatgaccaccaatagcaccagaatcagctactactggacgcgcgttaattccaacacgtttgaaaatacgactataagcattatacatctcttgatacgtttgatctaatgatgcttcatcagcatggaaagaataagcatctttcatgatgaattctcttccacgtaataaaccaaaacgtggacgtttttcatcacggaacttagattgaatttggaataatgttaatggtaattgtttataagactttaattcgtctctaacgatagaagtcactacttcttcgtgagtaggtcctaaagcaaattctcttccattacggtcttttaatcgcattaattcaggaccataagccccccaacgtcctgactcttcccaaagttctgcttgctgtaatgctggcattaaaatctcaactgcatcaatattttccatttcttcacgaatgattctagaaatatgatttagtacacgtgttgctaatggtaaataactataaataccacttgtgctttgtttaattaaacctgcttttaataacaactgatgacttaaagcctcagcttcagaagggacttctctcattgttggtataaagactttcgattgtttcattttttatcctcctaaattataagaaataacgttgtatatcattccaagtgactaagaccataataatcactacaaatatagctccaacagcaataattgcagtttcagctcttttatttactggtcttctaaatatcgcttcataaataacaaataaaattctaccaccatctaaagctggaataggtaataagttcataatccctaagttaacactcaacaatgccgtatagtatgttaatgcaataataccttgttttactacagaatctacattgtgataaataccaactggaccatttaacatgtcaaaagtaaagccacctgtaaaaatacttccaatcatcgttccaactgctttaaaaataagtacacttttatcaaaaaattgttgtacgcctaatgctaatggcttaaatagtgaatgttcattcgcaggttgaaaacctaatacataagaagttttagaatttaattttgtttgtttaatcacttgttttttaggtgtaacatctagtgatttggtgtgaccatctcgtacaattttaattgttgtttgatggtctttcgttttattaagtgcattttgaatatcgctaaaatcgttaattttatagtgtccaacttgaacaattttatctccaggttttaatccagcttcttgtgctggataatggtctgctaattgttttaccgtaggagtaggcgtaccttgataataagctaagccaataaacagtacgagagctaaaataaagttaaataatgggcccgcaaataaagttaaaaacttaggtaatggttttttatgtgtaaattgacgatgccttggtgcaatttgaattaaactaccattttcaacaaagtaagcttttttagcaatattaaaatgatgtctttcattatcatatgctgtaataccttcaatatataaatcatctttaaaatcacatcgtttaacttcaatcgcttcaattttttggaatttatgttgatcatctaaaataatatgtgttatttcatcttgttcatttagttttattttaacattcattcctggctgaactggtggttcttctaacccatctcctgccattcttacatatccaccaactggaagtaaacgtattgtatataacgtttcatctttacggaaactgaaaattttgggtcccattccaatcgcaaattctggacacataatacctgcacgttttgcaaaaaacatatgtccatattcatgtactgtaacgagtacaccaaatacgataataaatgagacgattgtgattaagtaactcacttacaacacctcaattaattttaatatttaaattatctagattataagattttaaattttataataattcctagtataaaaaaacagttttaaaaaaagagctataaagtacacgattgtataatattaatcaaatgtgaactcaataactcctcaattatatcattatatgcttttcataaataaataaaacattaattttttattacatttgtagtaatagaatgtttaacagtggtaaaacaaacataaagctgtcaaatctatctaaaataccaccatgtcctggcaagattctgcctgaatctttaacaccaaaatgacgtttaaaaccagattctactaagtcacctaattgaccaaatacacttaaaataattgtaattaataataacagccaaatattcagatgaaaatctacaaaaaacatcattacaagtggaacaattaaactacaaatgagtcctccaataaaaccttcaatcgttttatttggactaatcactggccataatttgtgttttcccattaatcgtccaaatatatatgcgccagtatctgttaaccatacgatcaagaatgcaaaaagtatataatgtaaaccataagaacgtgtagcgtaaaaatacataaatcctattccaacgtatgctacagacattaaacaaaatgcagcgtccataaagctaaatctgtttttcgaaagtacagtataacttaatagtatgaagctcattgcaattaaactttttaattgaacatcactcacccaatctccggcagactgaggaagcataataatgataagcgctaaagcactaaaactacctggaattgataaaaatgtaatcatattcatatttaacaattcttttaaagcaattagcgccagcaaataagcaaaaagcattaaaacagttccaccttttaataatataggtagaaaaataagcaatgctataatcgcggtcaatgttcttactttcataatttactcctcacttaatcctccaaaacgtctttggcgagattgatatatttttatacattgttttaattcttcaccatcaaagtctggccataacttctcattaaaaataaattcactatacgaagcttgccaaattaagaagttactaaggcgttgttctccagatgtacgtattaataaatctggatctggatatggatgggtcattaaatgtttggaaatcatcaattcatcaatatcatcactgttttgaccattactttgaagttcatcataaattgatttcatactttgaacaagttcagctcgtccaccataattaatggcaaatactaatttcaatcctgtattatttttggttttttctttagcataattaattgcctcaattgttgattgaggtactgcatctaaaaaaccaatagtttctatcttaacatttttctctataagttctggtagaaatatttttaaaaaattcacaggtaaattcatgatataattaacttcactttcaggtcttgaccaattttccgttgaaaaagcgtataaagttaaatatttaatacctaaatgacttgcttgacgtgtcactttttttatggtttgcataccttcatagtgacctttaattctaggcattttacgcttttttgcccaacgaccatttccgtccatgataattgctatatgttcaggtaaattatgtatatctaaatcatcattttgattgattttagtcttatttctttttattagctttctaaacatggtctttcctccgagcctgatcatttctgttatattatataggttatttaagaaatcatctatcattttatcatactaaataatggcattgaataagcaaattaaaaaactgtaccaaagtctgacttggcacagtttagactaaaacaatttataatcttgtcatagaagagtatgatgaaatattaaacagacataatatctttttctttttcatcaactaaattatcaatttctttaattgaattgtctgttactttttgaacatcttctgtttggcttcttaaatcatcttcagtaatgtctccatttttttcgtcttttttcaattgatcattgatatcacgacgaatattacggattgaaacttttgaatcttcaccgatttttttaacatttttaactaattctttacggcgttcttcagttaaagcaggaacagtgatacgaataacttcaccgtcactagtagggttcacacctagattagcagcaataatcgctttttcaatatcagctacagatgttttatcatatggagaaatgacaagtaagcgtgcttcaggcacgtttatactcgctaactgttgaactggtgttggcgcaccataataatcaacatttactccatttaataaattagaattcgctctacccgcactaatattagctaattcacgtgataaattttcaattgattttttcattctagattttgtatcttgaattatctcactcatacatttacacctctaattatttagtaattaatgtaccaattttttcgcccataacggcacgtttaatattgccttcttccataatagagaatacatttaatggaatgttattatccatacagaatgaagaagcagttgaatccataacttgcaggccttcttgtaacatttgaatatgtgttagatgatcatatttcacagcatttttatcaatttttggatcggcagaatacacaccatcaacattatttttacccattaaaatgacatcggcctctacttcagctgcacgtagtgctgcagttgtgtcagtagagaagtatggattaccaataccagctgcaaaaataactacgcgttttttctctaaatgtctaattgcacgacgacgaatataaggctcagcaacctgtttcatttcaattgaagttaatactcgtgtatcacaatctaattgctctaaactatcttgtaatgccaatgcattcattacagtagcaagcatgcccatataatcagctgtaccacggtccatgcctaaatcgctacctgttttacctctccaaatattaccgccaccaacgataaccgctatttcacaattcattttagctacttcagcgacttgttttgctacacttttaatgatgataggattgataccaaaacctttttcacctgcaagtgcttcaccactaagtttcagtactacacgtttatatttagaagtatgcgccattattttttcctctctatgattaatgatatgtaatatatacaagtaaagaagacactaatggtcttctataataaaagaattttattatatagaatccttaaaggtgtcttctttcttgttagaataatgtgaacaaattatttcatttgacctttaacttcatcagcaaagttttcttcgcgtttttccataccttcgcctacttcataacgtacgaagtcagctaatttaccgcctttagattttaagaaagcttcaactgtttgatctggatctttaacaaagttttgatcaactgcacaaatttcttgaagatatttacgtaaacgaccttcaaccattttttcaacgattttttcaggtttaccttcatttaacgcttgttgttttaatacttctctttcgtgattaatttcttcatcacttacttgatctgaagaaacatatttagggttaattgcagcgatatgcattgctacatctttagcagcttcttcatcagtagatccttcaactacagttaatacaccgatacgtccacccatgtgtaagtatgcaccaaaagcatcgttatcagttttagttctaattgcaaaacgacgaatgcttaatttttcaccgatagttgagatagcttctttcattctttcatcaactgtttgaccacttgataatttagtttctaataaagcttctactgtttcagctttactttcaaggatttgattagcaatttctttaactaattcttggaatccttcgtttcgagcaacgaaatcagtttcagagttaatttcaacgattgctgcttcattaccttttacttctacatgtactaaaccttcagcagcgattcgatcagcttttttagctgctttagcgatacctttttcacgtaagtaatcgattgctttgtcgatatctccatcagtttcagttagcgcttttttacaatccatcatacctgcgccagttctttcacgtaattctttaacaagttttgctgaaattgccattaattattcctccaatatgtctaattgtaataatagatgatatttaaatattaccattaaaggtactattatttccaatactctattacaatttattaataatttttttaattaaggttattttaaaaataaaatacgatttaaaagcataattgaatatttatcctttatatttatacccaatttactatccgttttaaataaatattttaaaaaaagggcgataagcattacatcttatcacccatttaaactatatcttagtttgattcaacagtagtattttcttcagttgattctgctttttgagtttcttcactttcatctaaatcgatgttttgttctgcagctacttcatcgtttgaaataccttgttgaccttctaagacagcgtcagccattttaccagttaataatttaacggcacgaatagcatcatcattcgctgggataacatagtcgatttcatcaggatcacagttagtgtcaacgataccaacgatagggatatttaatttacgtgcttcagcaatcgcattgcgctctttacgagggtcaactacgaataatgcttgaggcatagatttcatatcacgaataccgcctaagaatttgattaaacggtcatattcttttttaagttcaacaacttcttttttaggtaaaacgtcaaataaaccgtcttcttccattttttcaatttcagaaatacgtttaatacgttttgagattgttttataattagttaagattccacctaaccatctttggttaacgtagaattgaccagcacgttctgcttcagctttaactgattcttgtgcttgttttttagtacctacgaataagactttaccgccatcttcagatacttgttttaagaagttataagcttcttcaactttttttactgttttttgtaagtcaatgatataaataccatttctttcagtaaagatatattttttcatttttgggttccaacggcgtgtttggtgaccgaagtgaacaccggcttctagtaattgtttcattgaaattactgccatgttaaattcctcctattggttaattacctccatagtaaactaatataaagacaatacttaagactgcaccctttatatttacattcactacgtgtgtattggctttatagccgtcaataataatatcatatatagaatcattacgcaacattttttgactgcgtaaaataaaaaaactactatcttaattttaatagatagtagttttaaaaataatttattcacttcgattaagttcatctaagaatttttcttttttaactttgataaatgtacctttcatgccaagcgatcgtgattctattacaccagcactttctaatttacgtaacgcatttacaattacagaacgtgtaatacctactctatctgctactttagatgcaattaatagaccttcattgccaccaagttcctcaaaaatatgttcaatcgcttctttttcagaataagataatgaattgattgccattgtaatagcagctttatcacgggcttctttctcaacttcattatgtttctcacgtaatatttccataccaataacagttgcagcgtattcgccaagcactaaatcattttcattaaagtcatctttaactcgtcctagaatcagtgtacctaagcgttcgcctccccctaaaatcgggaagatagttgttctactattaataaatacttctctgtgttctggagggaatactgtcaagtctgaatcaatatcaatattcgctttagtttgttgaacttgcataagtagttcagtgtattcacttggaatatgtttactttcagtcaacatattactaattcgttcactctttaaaagttcatttaaacttgaccctaaaattttacctctacgagaaacgatgaagacatttgtaacagttacattactaatagtctgagcaacatctttaaagtctaccgcaatgcctttatgtttttgtaataatgtatttaattctctagttttagataataagctcataaaatttctcctttatttatattataaaataaatgcacttaaatctttgtttgttgaaatagatttcaacttatcatcaacatactgtggtgttatatctactactgcatttggcatatttggtgcttcaaaagataaatcttctaacattttttctaaaatagtgtgtaatcgacgtgcaccaatattgtctgtatcttgattcacttgatatgccatttcagctaatcgtgttatcgcttcgtcagagaagttgacagtaacttcttcagtttttaacagtgcttcatactgctttataagagataacttaggttcagtcaatattctatagaaatcattaactgttaagctttcaagttcaactcgaattggaaaacgcccttgtaactcaggaatcaagtcacttggtttagaaacatggaaagcgccagcaccaataaatagcatgtgctcagtatttacagtaccatacttagtttgaatcatgctaccttcaaggattggtaatatatctctttgaacaccttgtcttgatacatcttgaccactattagaattgtttgtagcgactttatcaatctcatcgataaagataattcccatttgttctgctatttctaaagcttcttgattagcagtttcttgatcaattaattcatctgcaaaatcatcagtaagaattttacgtgctatttttactggcacttctctttctacttttcgtttaggcatcaattgattcatcatatcttgcatttgttgattttgactcgtgcctaacattcctaatgcaccagggtcttgttcaactttgattctaactttttcttcttctagcttgcctgctataagttgttgtcttatttctgaacgttttgttttgatttcttctgtaggtgcttcttcttcctcgtcattctgattaaaattaggaatagcaccacctaaaagagattcaagtggattattattttgagctgcttttttcttcatactaggaacaagtaattttactaatttttcattagctttttgtgttgcttcatctttaactaatgatttcttttgctcttttacgagtcttacagacacgtccaccaagtctctaaccatactttctacatcacgtccaacatatccaacttcagtgaattttgtagcttccactttaatgaatggtgcacctacgatttttgccatacgacgtgcaatttctgttttacctacaccagttgggccaatcattaaaatatttttgggcgcaatttcttgcttagtttcttcgccaagaagacttcttctgtatctatttcttaacgcgattgctactttacgttttgcatcttcttgacctacaatatattcgtccaatttagatacgatatctttaggtgttaattttataccgtttgtatccatttactattacctccaccttaatgtatgtccatatcaattcatttccgttttgtttatatatgttatttataaagtctcaacaataatattatcatttgtaaatacacaaatatctgaagcgacttttaagctttcatatgccatttctttcgcagtcatatgtgaagcatgacgtttaagcgctcttcctgcacttaatgcgtagtttcctcctgaaccaatagcgattaaatcatcgtcaggcgcaatgacttcacctgtaccacttaccactaaaataccatctttatccattacgataagcatggcttccagttgacgtaattgcttatctccacgccattcttgagcaagttctacagcagcgcgttctaaattaccgctaaattgttgtaatttagtttcaaatttttcaaataatgtaaatgcatcggctacgcttcctgcaaatcctgctaacactttaccttcgtataagcgtcttacttttctagctgtttgcttcataattacttgttcaccaagtgtaacttggccgtctccagccattgccgcttctccattgtgtcttacagcatatatcgttgtagcatgtaatgatgtcttactcatttatttactctccttttttgctcgagggtgtgcacttaaatacactttgcgcaattgttgatttgatacatgtgtatacttaccagttgtagaaaggttaacgtgtcctaataaagattgaactgttcttaggtctgcaccttgattcaataaatgtgtagcaaatgtatgtcttaatttatgaggatgaatttctgttacccctgctgtacgttcaactacatcattgagaagatatctaacacctctctcagtaataggatcacctttcatattaacaattaaataaggatgacttttacttttaagtggtttgaatttttctaaatattgttcaatactttgtctacaaaactctccaaaaggcacaaatcgttctttatttcctttacccaatacctttacccctggaagattcatatctaaatccataacctttatattcacaagttctgaaacacgaatgcctgttgcatataataattcaattactactctatctcttaatcctttttttgcatcgtttgaaacagtattaaataatgcttccatctcttcttcataaaaaaattgaggaagatattgctctttcttaggatgtacaagttgtataaaaggattatttactgatgtatcttgagtcatccaaaactcataaaatgttcttaatgttgatatttttcttgatacagtagtacgtttcaaattattggaatataaataacttagataatttcttgcatctttatattcaaacgttcttaaatttaacagttcttgttctaaaaactgattaaattgagctaaatcgtcatgatacgcttttaatgtatggtcggagaaatttctttcaactttaagcatattcaaaaatttcttttggatttcttccactaaaaatcccctccatcatatgcattgtagcatataaactgagggggactaaaataattagctatagaattcaaaatcttttgagaatttatgaataatttaaatctataacgtttttttgaaattttctagatagtctagagcacgatatgcttgtgcttcataacgttcttttttatctttaatgcggcgatcaagtgatggcaataaaccaaagttagcattcatcggttggaagtttttttcatttttagcatgagaaatataataagccatactccctatcattgtttctcttgggaaaatcacttctcctttcccaagtaacttatgcgctaaattgatacctgctacaaggccacttgctgcactttcaacatatccttccacacctgtcatttgtcctgcaaattgaattctatcattattaattaattcatatttttcatttaaaacatcaggtgaattgatgaaggtatttctatgcatcacaccatatctcacaatatcaacattttctaaacctggaattaattgaatgacttctttttgagcgccccattttaaatgtgtttggaatccaacaatattataaagcgtaccagccgcgtcatcttgacgtaattgcactactgcatatggacgtttaccagttttagggtcttctaatcctacaggtttcattggaccaaatagtaatgttttacgacctctaccagccatcacttcaaatggcatacatccttcaaaatatttttctttttcaaattcatttaccggtgcaacttcagcttctaataccgcatcataaaaacgattgaattcttcttcagtcatagggcagtttaaatatgctgcttcacctttatcatagcgtgatttcaaatagactttatccatatcaattgaatctttttcaatgattggagctgctgcatcgtaaaaatatagttgatctttacctgtaatttctacaatttctttagctaaattttcagttgttaacggtcctgttgcaatgattgtatgtccttctggaatactgtgaatttctttattcaaaacagttacattaggatgatttttcaatgtatctgtaatataaccagcaaagtcatgtctatctactgctaatgcaccaccagctggaactctggctttatcagctgctgcgatgattaatgaatctaaacgtcgcatttcttctttaagcacacctacaccatttgttaatgcgttaccacgtagtgaattagaacatactaactcagcaaatttatctgtatgatgggcaggcgtttgtttaacaggacgcatttcgattaaattcactttaataccacgttctgctaattgataagctgcttctgaaccagctaatcctgcgcctataacattaacagtttgactcatatacattctcctttaataaaaattctatttttgtacttcttctttataatcacaattagaacaaatcacttgagaactacgtccttttttatgttccatcaagtaatgattacattttggacaatctcttcctattggtttatcccaagaaataaagtcacactctggataattcgaacaaccataaaatagtctatttttcttggattttctctcaactacatcgccatctttgcattttggacaagtgacaccaatagttttaacaatagcttttgtatttcgacaatctgggaaattcgagcatgccataaatttaccataacgtcccatttttattaccataggggctccacatacttcgcaatcttcgccggctggttcatctttaatttcaactttttccatttcttcctctgcgcgcgcaacatctaatttaaaactaccatagaaattatcgataacttttctccaaccgatatcaccttctgcaattttatcgagcaaggtttccatattaactgtaaattcaacatcaataatttctgggaagtaatccttcacttgctcatacacgatttctcctagttcagttggtacaaaacgtttactttcaagtttaacataattacgtttttgaattgtgtcaatcgttggagcatatgttgaaggtctaccaatttttaattcttctaatgtcttaactaatcgtgcctctgtgtatcttggaggtggttgagtgaaatgttgtgccggttcaatttgtgttgcagttactttatcaccttgatttaattttggcaatttattttctttatcattatctttgtcatcttttgcttcaacatataatgtcataaagcctttaaatttgattgtttgtccatttgctctaaatttaatgtcattttgtgttacatctaaagccacagtatctaaaattgcaggagccatttgacttgctacaaaacgttcccaaattaatttatacaagcgatgttgatcacgtgttaaataagctttcatttcatctggtgtacgtaatgtacttgttggacgaatagcttcatgggcatcttgatccccttgtttaccttttgttttacggtttgaagtatactcagtaccatacttctcttcaatatatgattttgcttcatctttagcagtttgtgagattcgtgttgaatccgttctcatatatgtgattaatccaactgtgccttgtcgtttcaaatcgataccttcatataattgctgtgctaacatcatagtcttacgtgctttaaaattaagtttacgtgctgcttcttgttgtaacgtagacgttgtaaatggatttgccgggtatcttgttttttcttttttatttacattagtgatttcaaatgcatcaccatttaattcggatgtaattttttcaacatctttttttgtttttaatttatatggtttgtttttataatgtaagaatttagcagtgaacttcgattttttatatctaaattctccttcaattgaccaatattcttctggtttaaaattacggatttcattttcacggtcaatgactaatcttaaagcaactgattgtactcgaccagctgacaatcctttttttactttcttccatagtactggagaaatattataacctacaagtctatctaaaatacgacgcgcttgttgtgcatcaactaaattcatttcaataccacgaggatgtttaaaactttcttttactgcatccttagtgatttcattaaatactactctgttttcttttgattcttcaagttctaaaatttttgataaatgccaagcaatcgcttcaccttcgcggtcagggtcactagctaagaaaacttttttagcttttttcgcatatttttttaaatctttaacaacaggacctttccctcgaatagttatatattttggttcatagttatcttctacgtctacacccatttgacttcttggtaaatcacgtacgtgtcccatagaagcaataactttatatcgtttacctaaatatttttcaatggttttcgcttttgcaggcgactcaacgatgactaaattatctgccaaagtgaattcccccttgctttttcaattactaaagataaatgataaacggttaattttgtttttgtcaatattttaatccaatatagatatttttttatgaactatcctttgaattttcataattaattatatatatttaattgtttaaaaaacgataatcatataatatatcttctgcttctgaaacaatcattgcaccttcttgagcacgtaataaatttccttttgtcaaagggttaaacattgatccaggtaatacataaacatttctattttgatctaaagcacaatctattgtaatttgactaccacttttaattttagcttcagtaattaatacaccacgagacaacccgcttatcagacgatttctttcagggaattgatatttgtttatttttgttaaaggaggatattcacttatgactaaaccagtttcttcaattatattacgtaactttcgggtttcctttggatagtgatttaaatgaccaaaacctagaactgcaatagttgggagatgatgttttaatgcgaattgatgagctatgctatcagcacctttcgctaaaccggatacaatcgttagtggaatatttataaagtgaggaaatagataatctagtgcacacttagaataatgtgtggcctcacgtgaacctacaacacctaaagtatatgtagatgataataaatgtatatttccacgataaaataatataaaaggatagtcgtaaatagttttaagcaatggaggatattgagaagaaaatgaagtaacatagttaacctgagatctagaaagttgagtttgaatgtaatcgtaagaaatctcttctaattgagtaaaacgcttcttttttaaatatagagattcccattcattaatcatttcaaattgaacatgttcattaacattgaaaaattttggaaatacattgagtaaatgatgaatatgttgggtcgtataccctatccatctcatttttaataaaataaaatcattcatgaaataaatgtctccttttaatttattataccgtgaataattaatagtaaaatttcatttataagacaaatttgaaatataaatgtaaggagtaataatattaaaagattatgtatactttttgatttcataacataaaaaaatagagcgttcagtcatttataatatattggtagtctacgatatatataagaaaaactgccaacaaatttcagtaattgttgacagtttgaattcaattattaattacatcattgctacttcactgttaataattcttcataaatgcctgcttcttttgccgcttcaattagtgttgtaccaatttctgatggtgtatctgctgttttaacgccacattcattaagcgttttaattttttctgcagcagttcctttaccacctgagatgattgcacctgcatggcccatacgttttcctggaggtgctgtttgtccaccaacaaaaccaacaactggtttagtcatgtttgctttgacccattcagctgcttcttcttcagcagtaccaccgatttcaccaatcataacaacagcttttgtttctttatcttcattaaatgctttaagtacatcgataaaatttgtaccgttaactgggtccccaccgatacctactgctgtggtttgaccaataccttcttcagttagttgatgtactgcttcatatgttaaagtacctgaacgagagacaacgcctacatgtccctttttatgaatataacctggcatgataccaattttacattcatctgctgtaattacaccaggacagtttggtccaactaaacgtgtttttctatcctctaaataacgtttcactttaatcatatcaacaactggaatatgttcagtaatacagatcaccatatctaattctgcatcagctgcttctaaaattgaatctgcagcaaatggtgctggtacgtaaactactgatacgttagcacctgtttcttttttagcttcagctactgtattatacactggcacgccttcaaccacttgtccacctttacctggtgttacccctgcgacaatttgtgtgccataatcaagcatttgttttgtatggaaaagggcagtagaccctgtaataccttgcaccattaccttagtattcttatctataaatacacccattttagtgttcccatcctttccttacgcttctttaacaagtttaacaatttgttgtgcaccttcagccattgttgctgctggttcaattgctagaccagattcatttaaaatctctttaccacgtttaacatttgtaccttctaaacgaacaactaaaggtaaagttaattcgacttctttaactgctgctacaataccttctgcaatcacatcacatttcataattccaccgaagatatttacaaaaataccttttacattatcatcacccaagatgattttgaatgcttcagttactttttcttttgtagcaccgccaccaacgtctaggaagttagctggattaccaccgaaatgattaattgtatccattgtagccatggctaatccggcaccattaaccatacaaccaatgtcaccatctaaggcaatatatgataaatcatatttagatgcttgaatttcttttggatcttcttcttctaaatcacgtaactctaaaatatctttatgtctgaataatgcattatcatcaaaatttaattttgcgtctaaagctaaaacatcaccatcaccagttgttacaagtggattaatttcaacaatagaacaatctttttcaacaaaaacattatataaagaaagtaagaattttgctgctttatttacagattcttttggaatattaatattgaatgcaatacgacgtgcttggaatggtgataaccctatcactggatcgattgtttctttaaagattttttctggcgttttagctgcaacttcttcaatttcagttccaccttcttcagaagccatcaatgtaatgcgatcagtagcacgatcaatgacaaagcctacataatattctttttgaatatcacaaccttcttcgatatataagcgtttaacttctttaccttcaggtccagtttgatgcgttactaattgcttgcctaataattcattagcataagtttcaacttcagacagtgatttagcaattttaactccacctgctttacctctacccccagcgtgaatttgtgctttcactacataaacatctgaatttaattcttttgccttttccaccgcttcttcagcagtaaatgctacacgtccttctggaacggctacacccatagcacgaaatatttctttaccttgatactcgtggatattcatcttccatcctcctgtttcttaggttaagttcactttaattatagaaaatgtaagcgcttttgtaaactgaaagtgttatactttttgcaatagtttttaaattcaaataattttaattttattttaattatatcattgatttaacaggctcaaacgttttacgatgatatggcgttatgcctaattgttttaatccttgaaggtgtgatttagtgccatatcctacatttttttcaaaatcataaccaggatatttcagtgctacttccgccattaaaccatccctatattcttttgccatgatactagcagcagcaatagaaacacttttagcatctcctttaataatagaagtttgaggcattgcattatccaatgtcatagcatcaataagtaaatgattaggttgttgttttaattgattaatagcacgttccatagctaatttggttgcgttgtaaatattgaactcatcaatttcttcagcgcttgctatcccgtaagcatagtcataaacaccttctttcaattgttcgttaagtatttttcgctttgttgctgaaactttcttcgagtcatctaatcctaaatattgatgttctttatttaaaatgactgcacaagctacaacaggcccagcaagtggaccacgacctacttcatcaatcccacatattaaagcattaggattgtcctttaatattttattttcatatttattcatttgttgataatgttcttgtgtttcttgatcttttaaaagctgtttacgacgtcgtactatattttgctgtaccccttttcttgtatcactcattaattcatgttgttcaagtgcttcaattgaatcaattgtgtctaataatgctttaatctctttaattgtttgaggcataatctaagtcccctttcatttctgaataaatatccaaacaataagttccaattttagcattacgcacatcattaataatcaattcgatgacagcctcgtaatcaacttcatttcctttttgtaataacccacgtcgacgtccaatagcatcaaaccattctaaaatttctgcatcagtttctacatcaatattgtaatgattcttcaatccttcaacatcatgtttaattaagaattgtaaaccgtatattgctacttcatctaagtgcacgatactatctttaatggcaccagtaaggcttagttttttacctacagtttcatcttcaaatttgggccataaaatacctggcgtatctagcagttgtaatgctttacctactttaatccattgttgttgtttcgttactcccggcttatttcctgtttgagcaatgttttttttagctaacttattaattaatgtagattttcccacattaggtataccaacaatcatggcacgtatagctctaggtttaagtcctttcgctttttctttctcaaacttttctttagtcgcttcaattgcagcattttctacgccttttaaatttttgccgtgtttcgcatcaactgctacaggataaaaacctttatcagtaaagaaatgttcccacttttgcatttcatttaaattcgacatatcttttttatttaaaataactacgcgtggtttttgattaatgacatcatcaatcattggatttcttgaactatacggtatacgtgcgtcaacaagttcaaataccacatctactttcttaagttgttctgtcacttctcttttggcctttgccatatgccctggataccattgaatcaccatgacattcaccctactttcattaaatttatttcaactgttcgattataatcaatatttaaaatcttcactactgttatcagttctattatattttaacatgctattttatattcattaaatcgctaatattaaaaacacatttttaattttttataaaacatataaatacttttattaagaagtttaatactctacaatttagtatgtagtcatgttttaattattaatagtacattctaactacagaggtttaatatgaaaaaattttttacttatctaggactttttatagcactgtccataataggacatagttatgtcatttatcgttttattcacgatggcattttatttacaggtccaaatgatggaatggaacaaatggttccaattcaaatgtatttatttgataaatggagtagtggcaatttgttttattccaccgattttggattaggtggagatttctttacagatcttagttactacttctccacaaatattttatttataataaatgtagtatttattgcaattattaaaatttttattcctttacatacgcatgatgtattattttggatgattaatgcacttattatctcaatgattaaaacaacgattgccatgtattgcacttacttatatagtaaatacatttcaaataacaaatacttaagcttaattgtagcgtttttatttgttatgtcacccttatattatcgctttacagtgtattggcccttctttagtgatgtgtttgtttggatgccgttattattattctctattgaaagagtcttgcaaaaacagaagtttggactattcattattactgtttctttaatactaattaataacttttattttgcatactatctttgtttaataggtgcgggttatatactgattcgtgtaatatttagacatcccaaagatattctctcaagaagtaaagcattttttactttaatcattagtgccctgttaggtttaggtaatagtttatttatcttttttcatggtgctcaaagctttttaaataaccgtcgtgtacctttttctggagcagttgatacattcgaaaaattagatattaatacaaacattttctttgataattatttaattgtattattatttattaccattcaagctcttttaagttttaaattatataaacattattattatcgtttatttgctatccttacctttgtatttattatatttagttttatacctttcatcgaccaagtatttaatggtttttcagcgcctcaaaagcgttggcattttattttagcttttaattccacaatattaatcggattatttttaaaatatttcaaaacactaactacaaaatcttatctaataagtaatgtaatcgcagaattagttatatttataagcgctattatatatcataaatttttagcatggttcatattagtccctattgtatctttaattggactgatggttcttatcattaaagatcgtacatatcgttttaaattaagttatttatataatatttcaattatattattaagtatcttgatctctatagtattcattaaaaatcaaatttactataaagatcacactgatcgtggaaatacgttttatattaattccagtttatatagttccgacttacaacgtgcgcttgtcaaagaaatgaatcaaaataagcatgaggatgaacgtatcgattggagagtcaacgaacaagataatacaccgatgtatcaacattttaaagggttaagtttgtattcaagtattttccatcataatatactcgattattattacgatgctttaaaaattaatttagctgaggagtcattgagtcgatatcaatcaacgaatggacgacaaaatatcgcgagtctattttcagtgcgttatatgatgctaaaaaattatcaaaataacttaccttcctacttcaaaaaaataaaatcaagcgggcaatatggtatttatgaaaatacacttaacttaccctctgttaaagtaactgattctatatacaatagtaaaaaattaacaactgcaattgatagagaacatgcaatgttaaaaggtgttattttaaacaatgaaggcacaagttataaagataaagctcctaatttattaactcaatcatcattgagttataaaaatctaaaacatttaaatggtaatgtctataaagtaattggagataaaggtggaacattaacaatacacttacctcgatcattacgccaaaagtatgatgatttttacgttacgatgaaaataaagcgtggtcatcccgatagtaattacacagtctctgtgaataattatgcaaatcaccgattatttaataattctacttatcgtactggtattgatacacaactttaccgaacacaacttgataataaaggaaacatcaatatcactttatctcctaaaggaacattttatttaaatcttcaacaattaaatggtgaaaactataaaatgttaaaacaaatgcatgaaaaagctgattttaataacaaatataaagatattaaaaatggcgtcgaagtcaacttagctaaacatgataaagggattgcttcaattaatattccttatagagaaggtatgcaagcgtatgttgatggacaccgtattaaacctatgaaagttaattacatgatgacaggcgttcctgttaattcatctgccaaaaaaataattattaaatatcaaccaccttattggaatactatgattttaatttcactaatcagtataataataagtgttgtatttgttagatttgttaataccaaaaagagaaagatgaggaaaaacattgatcaataaaattcggtccaatcgattattgacctttttatctatatttataattgctaatatcatttctttagcagtttattatccatttattcgagattatgtcaaagaaggatttgtatttagtggttccggagatggttttagacaaatgatgccatttcaaatgtacttatatgaacattatagtaagttcaaaggagcctatgatcaatcatttggattaggtggagattacattaaggggttagcctattattattctttatctccgataatgtggattaatttttttataatctgggtaagtcactttttatttcattggcaaacgagtcacatcgccttttgggcaactaaccaattaataatcgcttacgctagaacgattattacaattattgttgtattttactacttaaaatggctaaagttgaaaacggcgccattgcttatcgctactattttatatggtgcatccactcttgttctttactataactatacatggtcattttatggagacttattgattttattacctttatctttatggggaatggaacgtttcttccaaaaaagaagaatagggctatttatcttttcagttgcgctgaccttattttctaatttttatttcagttactaccaagctattgtattagggatttatttcatattaagaatcatttttaaatatcgttatgatatcgtatcaagatgggaaaaattttatttactcgttattggtgcaatacttgcgcttttatctagtattttaggattctatacaggtgtatcttcattcctaaataatgatagagcccaaaataatgactttaatattacattgtttacagatttaacacaaaataaatatcatattttttctgatggtttttatatcacagtttcgattattgcattgatggcgttatttacgtttaagttatatcgtcactactattataaaatttttgctattatcacttggtttttacttattggatcgttatcacaatactttgatagtgcatttaatggcttttcactaccacaacgtcgatgggtatactttttatctatttcaactagtatcttaattgcattatatattcaatatttatctgaacttacattaaaacaatatttacttgtagcaattccggtatttatatttggtttatatcactatatatttacaagtacttatgtcaattggatgattgtaccattatttttaatcatcgttttaacctttgtagtatggaaaaaacaatggttatatcaaccctatatactaatagctattgtgttactattctttgtacaacaaattatgatgacacacgattcacgagctcgtactattgatccgtatgcaacaactacaaaaacattaacagattcaagttattataaccataaacttgctaaaagaattaataatattaagaaacaaaaagataataaaaatcctttccatcgtatcgattatatgtcagcctatgcactcaattcaccatttatttaccattataatggcatttcactttattcaagtatttttgatggtgacatattaaaatactatgataaagaaatgcaaattaatatgcctgttgataagaatagtacatatagatacttagggaaccgagcaaatttagaagccatgtgggatgttcaaaatcgattccgacatcctaacgatctgaatatgccttatggttttaaaaaggtagatactatcaataatggttcagataaattaattcattcagaaaatactattaattatccagccactcatattactaataagatttttaataaacatgatctcaaatcgccattagatcgtgagcaagcgatgctacaaggtgtagtattagatgatgattcaataaaagcgaatacttctttcactcaaaataaaaacctattaagtaaagcatatcaatctacacataatgctacttggaaagataaaattcatttaaacgtagaaaaaaataatggtggtatcacattgacattacctaaaacgttagctaatcaatataaagatatgtatgtcgaaatggatgtagaattgttagctcccgatattgagcattctataggagtaaatgaatatgctcaaaatcgtaatatgctaagttataaatatcgacgttttgtaactcctgtaacaatgagagtaaaagcgtcggatcaattaaagattcgtcttactaaaggacattatcgactatctattaaaggtatctatggagaagattatcatacattaaaacaagcttctaaatcacttaaacctgtgactatttcacaatttagaagtggctatacattcactaaacctaaaggaacttctggatacttggtggtaccaatcgcctatgctaacggtatgcatgcacgtgttaatggacacgatgtagatgtaaaacaagctaacggtattatgacagctattccagtcaagaaaaatgatactcatattgaattatcttatacaccaccacatttttatatactattaattttgagcgttatcggaataataagcagtataatatttagcagatatttaaaaagaaaaaatcaattaaaataaaaagcgcctgggtcataattcctagcaaaatagccagtaaatgagtttattataaattcatttactggcttctttatttacaatactgggtattgttggctcgctttcttagggggacagcttcagcctgtagtcttcagcttgtcttgttcccttaaaagtcttgccaaaatactttgtatttatatgtaattttacattgaaatacttaaaaaataagacatattcgtataatttaataaacatcactacactaaattaacgaggtgccttatgtataatgattataatatgattcaacttactctaccaatggcaatttcagttctcattcccataaatgatatttcacgacatgtaaatgatattgtagaaacaaatactaagactgaatttatttgtccgaacaatcaaagactaggatttaaaaaatatacctatcaccatgataaatatggctttaaaagagactttaaattatatgaatgtgatgatgattcagaatgtcctctgaaacacccatgtatgaacttcaattcaaaaacaaataaaaaataatgaagaattataattgggaatattttaaagcgcaaattaataaaaagctttcaaaaccaaaaacaaaaccatctacagtcaaagaaaaattgatgtggcgcctgtttttagatttataaagactattttgagtttcactcgaatgtccgttcgagatataaataaagactaaagagaactaggatttggactaatggcacttaatataagaaaagtaacagctcaacgagcaaaaaataatcacaaaaattataaaaaagacaatctctatattatttcaatagaaattgtctttatttacttatcctggaactttatgccccagattcttttttaaatgcgtattaacttacccattttttagtatagttttctatatactgattagcgaatttcttgaattcttgcagctttaccacgtaaactacgtaagtagtataatttagcacgacgtactttaccgcgacgtttaacttcgattttttcgatttttggagtgtgtaatgggaatgtacgttcaacacctacacctgaagaaattttacgaactgtgaaagtttcagaaattcctccaccgcgacgtttaattacaacaccttcgaaaacttggatacgttcacgtgaaccttcgacgatacgtacgtgtacacgtaaagtgtcaccagtacggaaagttggtaagtctgtgcgtaattgtgattttgtaactgcttcgattaacttatgattactcatttttatactctccttcaacctatgttcttgcctagacaatcatatagcagcggatcatagtgatttttagtgtcttttcacacttgatatatattagcatactcctagttgtttttcaattggtttttatagctttctaaaaattctttatccttatcacttaattgatacttttctagtaagtccggacgtttatgcaaagtacgtattaatttttgttcatgtcgccatttttctatatttgcatgatttccagataataatacgtcaggtacagtcatacctttatattctcttggacgcgtatattgtgggaattcaagtaaaccatcggagaaagaatcatcttgatgggattgttcattaccaagtactccaggaattaatctaacgatagcatcagtcatagtcatagctggtaattctccaccagtcaatacataatcccccattgaaatttcatcggttactaaattttctctaattctttcgtcatatccttcgtaatgtccacaaataaatacaatatgttcagcttcacttaattcttcagcaattgcttgagagaatggtcgtccttgaggacacatgagaatgacacgcgttttatcagtatgttttaaatctttcattgcattaaacactggttctggttttaaaaccattccttgaccgccaccatacggataatcatccacttgattatgtttattttcagcgtagtctctaaagtttacagtattaacttcaataatatttttatcttgcgcacgcttcaaaatcgaatgatttagaacgccgtcgaacatttctggaaataatgttaggtaatctattttcatcattctaataatccttccattggcgtaatacgaattgttttatgttcaacatctacttctttaacgacatctgctatatatggaataaggtattctttatcacctttaacaacccatacatcattggcacctgtttcaaaaatattaatgactcttccaattggtgtatcattattaaaaaccgtacacccaataatatcagaatagtaaaattcgttttcattcaattcaatatcctcatgatcacgttcttggaataagtaatctcctttatattgttcgacgtcattaatatgattaataccttcaaatttaagcatgtgaaatcctttatgtatacgatatgatgtaatagtcatttctatttcattatggtggtgattcacgataaggacttctccaggttgaaaacgtgtatcagtaaaatcagaattagattttacttttacttctcctttaatcccatgtgtatttacaatttgtcctacttctacttgcatccttatcctccttacatagtcgtttatttatacatattaacatgtttcttataaagtgagaatataataaaagcctgtgacatatcttatgccacagacctgttattatatgatattgatattattatcaattattttgaacgtttttgttcatcaaatgtttttaaaataccttgttttgataagatattgtgaacagtatcagttggttttgcaccgtcttttaaccattttaaagctaattcttcatcgattttaacttctggtgcatttacacttgctggattgtaagtaccgatttgttcgatgatacgaccatcacgtggtgaacgcgcatcagctacaacgatacgatagaatggatttctttttgaacctaaacgagttaagcgaattttaactgccatttataaaactctcctttaaatcttttaatttttattttctacaagaaataataataacaggaacctccaactttgtaaagacttttttctttaccaaatctagatttataaaataaattgtagatttgatgatgtactagctttaactagagcttacctttattcattttggttatgcatgtgccaatgtacatgcgttcctttacttatttatgaaaaagcggaataacacttaggatgttattccgctttcattactttttagaatggtaaattcatgccttttaacatattttccatttggctacgtttaccttttttacctttacgaccattacccgtaaattgtttcatcatttttttcatatcattaaattgtttcattaaacgattcacttcctgcaatgaacggcctgagccttttgctatacgtttctttcttgaaacatttaaaattgctggatcttgtctttcattaggtgtcattgattgaataatagctttaatatggtcaatttgtttgtcactcatatttagcttatctaagcctttcattttattcatacctggaatcattttcataatatcatccagtggtcctaaattcttcacttgatccaattgttctaagaagtcatctaatgtaaatgaagactcacgcattttcttttctaaatctttagctttttcttggtccacatcttgttgcgctttttcgataagacttaatacgtcacccatacctagtatacgagatgccatacgctctggatggaataattctaaaccatccattttttcactcataccaacaaatttaattggtttatgtgttactgcacgaatagaaagtgccgcaccaccacgagtatctccgtctaatttagttaaagtcacaccagtgacatccaattgctcatcaaatgattgcgcaacgttcacagcatcttgtcctgtcatcgcatctacaacaagcataatttcatctggttttgagatttctttaacatcagctaattcattcattaatgtttcatcaatgtgtaaacgtcccgcagtatcgataattacaaagtccaaatggtcttctttagcatatcttaatgcgttatctacaatttgttgtggtttaacttgatcaccttcactataaacaggtacatcaagttgtttacctactgtttgtaattgattaatcgcagcgggacgatatatgtcggctgctactaacattggctttttattatattttttacgcattaacaatgccaatttaccagcagtagttgttttacctgccccttgtaaaccaaccatcattacaactgtgggtggcttattagccattttaatagatgtattttctccacccattaattgtgttaattcatcttgtactatttttataacttgttgtccaggtgttaaagactgcataacgtctgatcccaaagcacgttcggaaactgttttaacaaagtctttgactaccttgaagttaacatcggcttctaacaatgctaatctaacttcacgcatcattgttttaatatccgcttctgttactttacctttaccgcgaattttttgcatcgtggcttgtaaacgatcggataatccttcaaatgccatattaacaacctccttataaattattctagttcttctaatttttggattaaatgtttcagttttttagtatcatgaatagattgtttcatttcgttataaatcatttgacgttgttcaaatttctcatataactttaatttagtttcatagtcttctactaaatcgccagttcttcttatattatcataaaccgcttgtctactcactttaaacgtttcagcaatttcacttaatgagtaatcatttagataaaataattcaagataattcttttgtttttcagtaagcaaagaatgataaaaatcaaatagataattcattcttaacgttttaactaaatcatttttccccattttggtgttcctcattattatctgttaagctttgcatttcatcagggatattatcattttgctcaatcatatcagcaaacaatccatatacataactttcaggattaaatggttgtaaatcatctagtttttcacctaaaccaacgtatttaacaggaatatgcaattcatttcgaatagcaagtacaataccaccttttgctgtgccatctaatttagtgagcacaatccctgaaacgttggttacttctttgaatgaacgtgcttgtgatagtgcattttgaccagtggttgcgtctaaacataataatgcttcatgtggtgcatctggaacagcacgactaatgactcttttcattttgtccaattcttgcattaagtttgatttattttgtaaacgacctgctgtatcacaaattaatatatctacacctttattcttagccgcattgattgcatcataaacaactgctgcaggatcagaaccttcgctttgtctgattacctctacgcctacacgatcgccccaaacttgtaattgttcaattgcacctgctctaaaagtatcaccagcagccaacataacttttttaccttccattttataacgatgtgccaatttaccaatcgttgtagttttacctacaccattgaccccaaccattaaaatgacatttaatcggccatcttcgatattcattgcttctgaatgatcatcttcttggtgataaatttctacaattttttcaacgataacttctcttaaaccttcagtttctttgatattacgacgttgtgcttctgtacgtaattcatccgttaattgcataaccgtattgaaacctacatccgcagtaatcaacatttcttctaaagcttcgaagaaatcttcatctacagttcgataacgtgcaatcaagttatttaattgctcttggaagttttctcttgatttttctaaacctgctttaaatttcgctcccattttttgagcttcaatttcttcaaaatcttcaattgaaattaacccatcttcatcgaagtcagcttcgcttaatttacgtggttttttcttttttggtgcaggttcttcattttcttgttcattgtcttttgttgatggttgatctaatttctcatcttccgttaattccttttcaatatcttcagtcgactttgtagaaaatttatcttttagtcgtttgaaaaaactcatgcattttcctccttcataacctcatctattgtatttaaatttacacttactaattttgaaacgcctgactcttgcattgtaacaccatataaacgatccgaatactccattgtaccttttctatgcgtaatgacgataaactgtgttttttcagataaatcatttaaaaattgtgcgtaacgaataacattggcttcatccaaagctgcttccacttcgtctagtataacaaatggtgctgatcttacttttaaaatagcaaatagtaatgcaatagcacttaatgcgcgttcgccaccacttaatagagaaagatgttgtaattttttacctggtggttgaacaataatatctactcctgcagacaagtaatcatcatccgtaagttctaacttggcatgaccaccaccaaaaagtgattgaaatacagatgtaaaataatcttgtacttcaaaaaatgtagctttgaaacgatcttttacttcttgatccatttcatcaatgatttgttctaaagtctgttttgcttctcttaaatcatttctctgttcattcaaaaatgtataacgctcatttaattcttcaaattgttcaatagcattaacattaactgaacctaattcttcaattgacatcttagttaatttcactttttttcttaatgtttctattggaacatctgattgatacgtttctctcgcacgttcaagtgtaagatgatacgtttcatttaaatgattcattgcatgattaataagaacatctaatttagactgttgggccttaatatcttgataaaaactttcaatggataataaatcttgatggcattgttcgagtttgtactcatgaatttcaatatcttcatttatagactctttttgttcttttaaagcatcaagtttttgttttaatgtgtcacgttgagacgctttatcttggatacttgattgaagctgttgaaatgctttttcgcccatcatatcgtcagaattaaataattctattttctctttagttgctatgatttgttggttaatttgtgcatgttgtttgtctattctttccaacgacatagtttgatgacttattttttctttaacgactgcaacatcagaacgtttttgatttaattctttttcaacttgcgatacattttctttaccctctttagagagctttgaatatacctctatgtccttttcaagttgttttagttgctcttgaatttcagataaccgtaattgttgttgttttaatgtatgacgacttttttcactttgatagccatcatttttctcaaattcaaattcttcatgttcactttttatatgtgtttcttgtttttttaatcgatctaaagtcaatgtttcttcgtgagcggtggcttttaattgatgatattgttgacttaaatctacatacttattacttaatgtctcaacttcctctttttgattttgcaattgttgttcgaattcttttgttttctcttcgtagtcgtttaattgtgttttcattgttgtcaattcatctttttgagctaaaatactttttgattgacgcattccgccacctgacattgatcctcctggattaacgatatctccttctaaggtaacgattcgcgctttatattgaatcgctcttgcaagttcattcgcaattttaagattctccactataattgtagtacccatcaaattatctatgacagcttgatacgtttgattaacttcaactgcttcagatgcaatattaataaaaccatcaaaatttcgagctacattttggatatgatgagataaacttcttgctctaattacatttagtggtaaaaatgttgctcttcctaatcctcgttgttttaaaaattttatcgcctggcgaccatctttttcattatttacaataatgtgttgtaaggaggctcctaacgctgtttcaatcgcttgtgttaattttgatggtaccttgatgacttcggctactgcaccatgaataccacttaaagtattctcttttgcttttaatatatgttttactccattaaaaaagtaggaatagtcttctgcttgtgtttctaaactttccatacgcacacgcattttatcagtatatcgatacgcttgatataacttatcttcatatgtcgcttctatacgttttgcttcagataaacgatattcaacgtcacgcatgtctttctctgttacattcattttttgtgatgtagtagtatgcgcttgttcggtttgatgtatgtccttttgaatatgtttaagttgatcaaatacttctattaatcttgcatcgagacgtgtttttttggtttcattttcttgaatagtacgttctaaaaaacgaatatcattattcacttcagattgctcggacattaattcataatattcatttttaatagtttctaatttttcatcatgttgtgcatctgtaagattaagttttgattctaactgtttaatctctttattaagcgattgatgctgttttttaagtttagatacttgttctaaagaaagttctctttcatcttgaacattctttaattcatactgtaaattatctaattcttcttcaaaacgtgcattcgtttctgattgatttctttttcgctcttcaaggacatttaattttccaataaatttttcatattcctcagttgtagtaattaaatctatattaacgtggtcggtatctctttcaagtttttgacgttgtgttttttgtttttgtaaatattgatttaattgagcttgttggccttctttttcagcttgttggctttttagatgattcaatcgttcatcgagttgacgattctcttcatcatattgattaatatcgtgtacagttacgacaacatcactatgctccatctcttttgataattgtaagtattctttagcaatagatgcttctgcttttagaggttcaacacgcccttctaaatcatataaaatatcttctactcgagatagattatcttctgtatgacctagtttttgtaaagattccgtttttctttttttatattttaaaacacccgctgattcttctatgatttgacgtcgatcaacaggtttagcatttaaaatttcatctactctaccttgtgaaataatactaaacgcttcttttcctagaccagaatctaaaaataactctgtaatatcgcgtagacgtgccctatcattatttaaataatattcgctctctccactacgataaagacgacgtgttacaatcacatcatcagcctcaatctgcaactctcttgtagaattatctaattttaattgtacttctgcataattttgtgcttgacgatgttctgcccctgagaaaataatatcttccattttagagccacgaagcgacttagcagattgttctcctaaaacccatttaatcgcatcagtaatattactttttccactaccatttggaccaacaattgctgtcacgcctctatcgaactgtacattcgtacgatctgcaaatgacttaaagccaatggtatctatagatttcaaataaaccatactcttctccttaattcattcatactcgttcttgttgaaaagaagataatatatgaaatgcgttcattattatttgttctcatctcttaacttatgataagcactttcagctgctttttgttcagattctttttttgttctgccttgtccttttgcgattgctttattttctaaaatcacttcagatgtaaataaacgatggtgtgctggaccttcttctttaatcaaatgatacgtcacatctcctttactttgactatgaatatattcttggaattgtgttttaaaatcgaccacgccaattaattcattatgttctacatatggaaaaatgactttttgagcaaacttccagactacttctaagccttggtctaagtataaagccccaataaacgcttcaaaagcatctgatactaatgaaggtcttgttctaccgcctgttttttcttcgccttttccaagtaaaatgagttgatttaattcaattttatttgcaaatattacaagtgagggttcacatacgattgtcgctctcattttagttaaatttccttcaggtaaattaggatatttgtcaaaaaggtaacgtgaaaccgtcaattctaataccgcatctcctaaaaattctaaacgctcgttatgcgctaatcgatccatattaaaatcattaataaagctagagtgcgaaaacgcttgttggtacacatctaaatgagtataactaagaccaagcatcttcatttttttatcaaattgatattgaaaatctttaatcatttctgattgtttcgggtgcatgattgataaacctccgttcatgttattgatgtcctatgaaaaaaatctgagccatcatgacgacgactcagatgtaagtttttatttttcaagactattgatgtatttaattgcatcaccaacagtgttgattttttcagcttcttcatcaggaatttcagtaccaaattcgtcttctaattccatcactaattcagcgatatcaagtgagtcagcgcctaaatcatctttgaaagatgcatcttctgttactttatcagcgtctacacctaaacggtcaacgatgatatcttttactttatcgaagttttccacgtcgattcacctcctttaaaagtgtctatccatagactattatattttcccattttaagggctaaaacacaagtatttattaaaaggatataatgactatttatccttttaaatacatgacgtatatattacatatacatgccaccattaactgataacgtttgaccagtaatatatttcgcacgattagatgctaaaaatgacactgcataggcaatatctttatcttctccaaaacgtgataatggaatttgctccaacatttgtgatttaagatcttcatttaatgcatttgtcatatctgagacgataaacccaggcgcaactgcattaacagtaataccacgtgaagcaagttcacgtgcacttgattttgtcagtccttcaatacctgcttttgtcgctacataattagcttgtccaggattacccatagccgctacaatactagataaattgataatagcaccgctacgttggcgtaacatttgtggcgtagctttttgaatacaattaaatgtcccttttaagttagtattaataacgtcatcccattcttgctctttcattcgcattaataaattgtcttttgtaatacctgcgttgtttacaagaacatctaaagagccaaattgatttacaacttctttaatcatggctttgacttgatcaccttcagcaacgtttgcttgtattgcaaaactttctacgcctttttctttgatttctttaaccactgcttctgctttttctttattacccgcgtaattaactgctacattgaatccatcttctgctaattgcaatgcaatactacgtccaattcctctagaagcaccagttactaatgcacttttagtcattttcattccatcctttcacatcttctaatgtttgaatcgatgtaatttttacatctcgattaatttttttaattaaaccagataatactttaccaggcccaatttcaataaaatgatccacgccttggtctattaaccactctgtagatttaataaattgtactggtgaatagagttgtttcaccatattttgtttaatcgtttctgcttttgtttctccatgagcattataattttgaacgataggaaattgagcatcattccaagtgaattgatcaataaatgaagcgaaatcctcttcaattacttgcatcattgaagaatggaagggacctgatactgctaaaggaatcacacgcttcgcacctaaaatttttccttctttagttaatttatcaatcagcgccttatgcccagatacaacaatttgacctggtgcattaatattggcaggttcaattaattgatctccaaatgaaatttctttacaaatttcatctacttcttcataacttaaccctaaaacagcagccatacttcctacaccatttggaaaagcttgagtcattaattcgccacgcttacgcacaattttcactgcatcttcaaattttagtacgccagcagccactaaacttgaatattcaccaagactatgccccattgtatagtcagcatctatacggtttagtgcttctagtaatgcaatactatgtgttaacaatgcaggttgagtattctcagtttctcctaattttttctctttatctgtaaacatcgtttctaataaatcaaaatcaacagttgtttgcgctaattctaaaacagaagtcgcatctttattaacatgatataaatctttagccattcctactttttgtgcaccttgtccaggaaaaacaattgcagttttactcattgtcaccacctaccgtttctctcataatttttactatttgttcatcaccagcaattttagcttgtcgaattgcagaatagaatgcacgtgcatttgaaccaccatgtgcttttactacagtaccatctaaccctaaaagaacagacccaccatattctgcatagtctaattttttcgcaaacttactgatatcttttttcaatatcgcagcagcaagcttattttttaaattagctagtagtgtaccttttaacatttttccaattgatttagcagtaccttcgatgttttttagtaccatatttccagtataaccatcagtgacaactacatctgtgtcaccctccatcaatgttttagcctcaatatttccattaaatcggagagtcgcttcatcttttaataattgatatgtttttttagtcaaggcatttccttttgctggttcagttccgatattcaacaatgatattttaggttgttgaatacctctaattttttgagcataaatattacctagctgtgcatattgcaataagtgttcaggttttgcatctgcattggctccaacatctaaaaagacaaatcctttaccatcgatagtaggtaatgtgacaacaagtgctggtctagctacgcctttaatacgtccgacgataaatagccctgctgacattaaagcacctgtattaccagcagatacacaaccatctgcctcaccagatttaaccgcttctgccatgcgtaccattgagctgtctttttttcttttaatggcacgtacaggctcatcttccatctcaattttttctgaacaatgtctaaactctatacgcttatgatttaatgtatattgtttttcatcaccaaataaaataatttctaaatctttaaaatcattgattgctttctctacagcttctaatacgatgcctggtgcattgtcgccacccatcatatctacagcaattttaaccatggttttcatcctcacttatataaaacattttaaatacgcctgtaaaaacgagtgtatcttttacaaaagattccacttttatatcataatgtcgctttgttctattgattacggttgcttctgctctaacattatcatgcaactttactttttcaataaatttcaaattactttcttgagttaaaacagtagagttatgtattagggctacacataatgaattagcttgagcaaataaaatatgcccacgtgcaatacgtgttttttgaaacacatactcttctgtaatttctataatagattgggcagaataattaggtttaacttgaataagatccccaattacttcattagcttccaatcctttgatatattcataattttgtttggctacagatttaatacgtttacgtaattcaggaatattaagttgtgtgcgatccagacggatagtttgaatacttacgttgaataattcacacaattcactatccgtaataaaggggttttcattaatcgccttcttaatctcatgacgacgttctgttttttttaatttcatactttcctcccctttaaatattttagtaccaagtcttaatcattcctcacatatcataacactttctatttattatcctcaacaaatattacattctcatataataaataatttgaattaaatatcagtttactgatgttaatcaaaactcatgttaagtaagtggtcgttgataaatgctcttaaacgttcatatttctcagtaaaaaactccccagattgaatgagttctgcggcctcatcacgagctacttctagcatacgataatcttctactatattagcaaccataaaatctggtaacccgctttgtttaactccaaagaaatcaccagggcctctcatttctaagtcatattcacttaattcaaatccatctgtagtttgtgtcataatagtcattctttctatgccagtttctgttttaggtgatgcaattaatacacaataactttgatgttcactacgtccaacacgacctctaagttgatgtagtgtagataatccaaagcgatcagcatcataaatcatcataaatgtagcattaggaacattaacgcctacttcaactacggttgtcgacactaagatatcaatatcatgattactaaaacgtgccattacatcatctttttcgtctgctgacattttcccatgtaataaacctacatgtgttttaccataaaactcttgtagtgactcaaaaagttcaacaacattttgtacatcttctaggtgttcagaactttcaattagtggacaaatcacataggcttgacgtcctttttttagttcgcttgtcatttgagctaacacttggtcatactgttcatgtttcgcccaatgtgtaataattggctttcgacctttaggtaattgtttaattgaggacacatccatttctccaaatactgaaatggctaacgttctcggtataggcgtcgcagtcataaacaatacgttggtcatagcacctttttctcttagtaattgacgttgattcacaccaaaacgatgctgttcatcagtaataactaaccctacatttttaaattgtacatcgtcttgaatcaatgcatgcgtgccaattaaacaatcgatcgttccattctctaattgttctaacaatacacgtcttttttttccttttaccgatccagttaataaagcaacattcatatggtcaccaaaaagttctgttaaactatttgcatgttgttcagccaaaatttctgtaggtaccatcagtgcagattgatatccagcagttttgagtgcatacatacaaattgctgctacaactgttttccctgacccaacatcaccttgtaataaacgatgcatgcgtattggcgctttcaaatctctaaatatttcattaacgctcgatttctgtgcatctgttaattcaaaaggtaacgactggataaatgacttcactttattaatattataattaatttcaatggcttcatctgaagctttttctaagcgatttaaccattgcatacgtagttcaaacataaataattcagtaaaagcatatgtacgtctcgcacgcataagagcttgtttatctttaggtagatgcaacgttttaatagtataatctagtaattccaatttgtacctttgtcttaattcctccgtaatccattcatgtatagtgacatcattaagagattgatgaatcatatcacgcatttgtttttgtttaataccttctttaagtcgatataccggttctaatctcacttcttcagtagaggtatgagtgtcattaaaaaaaatacgattgccattaatttcttgtttagcacgattccatttaccttttattgtcactgtttgatttaactcaattttcttttttaaatacggttgattaaaaaatacacatttaactgcgatattatcaatcattaaatggacagttaattttgatttattccgaccaaaaaaggctaccgtgggtacagaataaatttctcctgctactgtcacagtagattgatcttcagctaagtttaaatctacaacagtattatcttcataacgcgttggtaaatacaacactaaatcttctattgtgtgaatgtttaattcatgtagtaaagcaattctctttggtccaagtccttttatagattgaagcggatatggactttcaattaaactaactttcgacattatttctcacctaatatttttaatcttatttatattttatcacgtttattataaatatttagtgataccatcttactatagtccacttgacaaatgaatatcactcacttcatttaaacgtacaacattcacttttaatactaatatcgttttatcatacttaactaataatatgaaagagagcataaatctattttaaatgattttgcattagctcttaatcttatttaaattttagaagtacgaagtatttttatgttccatcaaggtttaaatcaaaaaacgatttatacatacattcccagttattattactgctaaattatatgatatttttttaatcactctttgaatattagttatcttcttaattgtgatatcttcctctattttacagttcattattgatagcatatttttctattttaatatatattgactggtcattatgtcttgaaaaacctattaaagtaagttttccagtgtcatatttttcaatacttttattaaatataaaatggggagtgacaacgataatcatttcatcgttatcactcccactattaaatctcactttattctacagcaaataaatatggataaattggttgatcacctttatggatttctatttcaacatctggatattcattttctacccattcttctaattgagttgtcatatcagattgtgcatcttcaccagtaatcactgttaagatttcactttcttcatttaacaatgtacttaataagccagtaatagttttaaattcatctgcattactagtcacaattttactttcagctaatcccataaattcatcttttttaatatctacaccatcaatcttagtatctctgacagcaaatgtaattgagccagatttaacagtttctaacgctgtattcatatgagacgcattttcttctaacgtagatgcaacatcatattggaaaagtgctgcaataccttgaggaatagatgtagttggaatgactactgtatcagctttaacaagttgtgctgcttgatcactagacattctaatatttttattatttggcaagataattgcacgctggcattcagactgttcaatcaccttaacaatatcctctgtagaaggattcattgtttgcccaccactaataatgtgtgtcacacccattgaagtgaacaactcagagataccttcacccattgaaatggcaattactgctgtttcaactgttttaggttgttgcgaagctgttgcttgttgatgactttgttcttttctaattacttcacgatgttgttcacgcatattttctacttttaatttaataagctcaccatattgttgtccataattgaacacttcacctggtgtttctgtatgtacatggactttaactatttcatcatcattaataactaataacgaatcaccaaattcgctcatgtcatttctgaatgtttgttcattaaattcttttttatcttttccaaagcgtaccatcatttcagtacaataaccgtacttaatatcttctgtattaataaccccatgaaaatcatgttcttcatgaaccaaatcttctgtgtctaatttttgtttgttagcttcaactttttcgccttttagtccttttaaaaagccttcgtagacacacaataaacctttaccgccactatccactacgcctacttcttttaaaactgctaataaatttggcgtattatttaaagattgctcagctttttcgattgtatattccattacttcgatgcaatcatctgtttcttctgctttagtcatagctgcacttgctgcatctttggcaacagtcaaaatagttccttcaactggtttcatgactgctttataagctgtatcgacacctgcttgaaaactactagcaaattgttgagcattaatttccttttcatcttcaatatttttgcaaaatcctctaaataattgagataaaataacaccagagttaccacgtgctcccattaaaagtcctttagaaaaagttttacctaattcaccaatactttgagataaattattttcaacttcttcgcgacctgaggtaattgttaaattcatatttgttcctgtatcaccatcaggtaccggatatacattaagggaatcaactaaatctgcattattagataaattgtgtgccccttgtattatcatatcggcaaataatttaccattaattttgctaatcatcgtgctttgtcctcctataccttcttgcccttgttattaagtcttacaccttgtacaaaaatattaatagaattcactttaatattaagtgaactttcgagtgtatattttactgatgattgtacattgttagctacttcagaaattttgacaccataacttacaatgatgtacatatctatatcaatcacaccattatcttctttaacaacaatacctttagcataattctcatgtcctaatatttcagcaataccgtctcttacttgttgtctagatgccatgccaacaatgccataactttctacagctttacttcctacaacagaagcaatgacctcatttgagatatcaattttgccatagtcatttaagatctctaatgtcatcttcattatcctcctgaattatggttaaaatcatatttaaaaatgatgtatacatatatgataaagataactattttataaataagccaatctacataaaaatatattataataactccacaatagttaattataccatagatttacattttcaaaacaattaacataaattacatatgattttattgctttaaatattgatatatggtatcttatttaaagtatataagtagttaagtgtatttatatttattaaaggaggtactttgatgggtaaacaatgttacgtaacaggtcgtaaagctacaactggtaataatcgttcacacgctttaaatgcgaacaaacgcagatttaacgctaaccttcaaaaagttagaattttagttgacggtaaacctaaaaaagtttgggtttctgctcgtgctttaaaatctggtaaagttactagagtttaataaatataatgcactaaaaatgccttcatatgtggtgaaggcatttttttattactctaaatctttacttctcatttgcaatacttgacctttttcaacttcgataatcgctattgattgatcgacttcattagagattgtcagtgtagagcctatttctaaatgctgatgatctaaattatatttaaacccagataaagatactatcacttctccatttactggaataaatgaaacatattgatatttatcagatttatgaagttgatgtgtcccagtattaagtagcatgatttcattttgcttatctattactttaattataatttctttttttatatagactgacttgaaaagaatttgtaatgttcccataaaatgatctaatcttccacccgttgctccatagatatctatttctgtatatcccttttgaatggcttgttctacgcctaatgctaaatcagtgtcatctttttcagctttaactggatgaatatttaatgttttttttaaaatttctctttcttcatcattgacggagtcaaaatcgcccactgaaaaaacaggtacaatactttgttcagaaagaattaaagtcccacggtctattccgccccacgattcagttgataattttgaaaaaatatgagggggtaaatgccgatctccacatagtaaattaattttcattatctcaacctctcaatattttagtcactgttttataatcatcttggttaaaaaagtatgaacctgtaacaaaaaggttagccccatgttttgcacaaatatctatcgttttatcatttataccaccatcgacttcaatatcaaaatttaaattaaaagatgacttcaaatcatttaataacttaatttttgaagcacacatgtcgataaatgtttgtccaccaaatccaggattaaccgtcattactaaaacataatccaccatagaaagaacaggtacgaccctatctacaggggtgccaggattaattactacacctgcttttttatctagacttttgataagttgaatagcacgatgaatatgaggggttgattcaatatggactgaaatcatgtctgccccatgttttgcaaatgtctcaatatagttttcaggattctcaatcatgaggtgtacatcaattggtaattgcgtagttgatcttactgcatctaatatgggtaatccaattgatatattaggtacaaattgaccatccataacatcaaaatgtagaccgtcaacgcctgcttcttctaataattgtatttcctgttttaaattcaaaaaatcgactgataataaagaaggaaaaatgtgtctcattaatatctaacctttctattcgaaatttcattaactaattgtaaataatgttcatagcgaaattgcgctaaattattgttttctaattgatgtttaacattgcatttaggttctttaatatgattacaatttctaaatttacaatcatttccaaaagcattaatttctttaaagtaatactttacatcatctttttcaatatgatcaaaatcaagtgcactaaaaccaggtgtatctgctataaaaccattttctctttcaaatagttctacatgtcttgtcgtatgtttacctcgattaagtgatttagaaatatcattggtttcaagatttagttctggtttaaacgtatttataaatgttgattttccaacaccagattgtccacttagcacaattagaccattaggccaggtattcacaatatcaactttatcagtttctttacctacaaattgaacagaatatcctatttccttatatgtatttagtaatgtttcgatatgactgatttgcgtttcactagcaatatcttttttagtgactaatatactaggagataagttgtaagaatgtgcaatcactaaaaatctatctaacaattgtgttgaaaaattaggttcaaccgcactcattacaataaccagaccatcaatattacttactggaggacgctttaatgcattgtggcgttcatgtacgtggtgaatataaccttcatcttcattttgaatatcaaagtcaacgatatctcctactacaggagaaaattttttctttctaaaaagaccacgaggtttagtattatatttttttccacctacatctacttgatatactccactaattaatttaacaatacgtcctgtttccaaattaacacctcaaattaagtatttatatttatattattatagcaaacatagaattaataatatatattctataccatcatcataaagataaggatagaaagacattaaaatcgctcaaaaaagttaactttacataataaaattatagttgttaaaaagacaatttctatattatttcaatagaaattgccttttaaaattgacatcatttatatcataaaatacatgttaatgtataaacagtaaacgatgcataacttatcattactatcttactcttgttctgatatttgaaatttattcatagtcaatatctttatctgcaataacattgtcatctacttcaatcgtatatccagcagaatcaccttgttcaatttttaatggaatagtaatgatcttatctttgtgaatattgtatgtttgacttacctgtgtaccactattatttttatctctaatataaatctttaccttttgactttctccatcatttccagtatacggaatatgataagtttccgtataattttttacgcttgtcgtatgattatctttcttatcatcagaagaatctgagtccttttttgaatcttcttttttatctttacccttagaaaccataaattctactgtacttccttcatttacttcagtctgctttggagattgtgaaataatgatatccttatctttagtatcactattagtcgtcttaacttgtacgtttagacccatcgactctaattcttttttagcattttgataatttttattttcatagtctttgacgtaaactttttttacacctaacgattcagtcagtacaatatgatgatcgttaagtttcaccgattcattagggttaatattttgcttgaaaatatatccttttggcatttgactattatattcttgattaattgtcacatgatttaatttatgatctttaagtttttttatagcctcttctttttttatcccgatcacattaggcatatttatcttttctgggccttttgataacacaacatctactttttcttgttggttaacacgttctcctgctttaggattggagttaataattttattttcgggatagtcatcattatattctctagatatatgtcctatttctaaatgcgaagcttttaatactttttctgcttctttttcagttttacccgttaaatcaggcatttctgtatatttatcactaagcatgccccaagcgataaacccaatcaaacttaataataaaagcgctaaaataaaaataatagcgaactttttctttttagaacgttttttacgtttaggtgtgtatacattattttcacttgcttgaaatttatgatgattgataataggaatttgcatcgtttgcgctatatcttttttatgagtttcttcttcgagtttattttttatttcttttttatcaatgggtactgtttgggtggtatcacttatacgcgtatgcttttcttcatttaatctgcttgtaacaagcacactactcaaatcattatacatttcttctatcgtttgataacgatttttaggatttttttcagtcgccttaagtaccacattacttaaagattgtggaatatttggatatttttcagtaatattaggaaccgtttcttgaatatgtttaatagcaatacttacagctgtctctccactaaaaggtggttcaccaactaacatttcatacaacactataccaattgaatagatatcggttgtttcattcgttttatctcctttagcttgttctggagataaatattgaaccgttccaagcacatgatttgtttgagtcattgatgtctcacttaacgcttttgcgatgccgaaatcaaaaatttttaaaattttatttttattaattagcacattttgaggtttaatatctctatgtataatacgttgctcatgcgcttgttttactccatttaaaatttgcttaataaaatcaatagctgtttctatattcaatggaccatgactatgtatatactcagatagtgtcggcccatcaatatattccataataagatagaaattatcatcatcttcttcaacatcatatacttccacgatattttcatgaacaatttgtgtagcactatttacctctctgtagaaacgtttcatagtttcatctttttcgctttggggaatagaaattgctttaatagccactttacgttcaagtatagtgtcttcagcaagataaaccatactcattcctccgccaccaagtttatctaagagttgatagcgatcattaattagcttgccattcatacattattaccctcaatttcagctaatagtacactcacattatctttagattgatgatctaaggcagcttgtatcagtgcttctccaagttcatttaatgatgtagactgattcattaacgtttctatttcgtgatttcttacataatctgacagtccatcagaattaagtaatatataattatagtaactgatgcgttttgtaaaaatatcaggacttactcggcgatcggtacccattactttagtaattatattacgttgaggatgattaaacgcttcttcttcagtaatttgtcctgtcataagcaaatgattaacaaatgaatgatcataggtaatctgttcaatttctcttgaattaatcacgtatgctctagaatcaccaatatttgctactacaattttattatcaaatatgagggcacatacacacgttgtgcccataccacgatattcttcattcgttgtagcatattcaaataattcgagattaatatcttttaatgtttgacttaaccatgattcagctcggtctaattcaataaaattttctttttcaaaatagtcttgtaattgattagtaacaaattgacttgcaacttcacctgctttatgaccacccattccatcacacaacactaacaattgttgatgtgtttggttataaaatatacctcccgcgtcttcgttcttttctcgatgttgtccagtatctgtgaaaaactgtgcgttaagcatgatgattacctcgtttctacttgtcgttccttagctcttaattgtccacatgctgcatctatatctgaaccttgttctcttctaattgttgcattgatgcctaaacgtttcaattctttttcaaatttaaaaatatcatctttgggtgttttaacataattacgttcaggaacatgattgactggtataagattcacatgacagtttaaatctttaattaaatgtgctaaatctcttgcatgttcaagttgatcatttacgcctccaaacaatccatattcaaatgtaattcgacgattcgttttttcttgataatatttaattgcttccattaattttccaacattatacgctctattaattggcattaattttgaacgaatttcatctttagcagcatgtaaacttactgcaaaattaatttgaatttgttcatcagcaaagtcataaatacgtgggataattcctgacgttgatactgtaatatgtcgcgctccaatgtttaaactattatcgtcattgactatttttaaaaagtccatcatttcatcataattttcgaagggttcaccaattcccataataacaatttgtgatacacgttcattagtagcatcaagtgctttttgaactgtaagtacttgagatacaatctcgccagcctctaagttacgctttaaaccacctaaagttgaagcacaaaatgtacaaccaattcgacagccaacttgagtcgttacacatacagaattaccgtaatcgtgtctcattaataccgtttcaatagtataaccatcttgtaattcaaataaaaacttaattgttccatctttactttcttgtttaactacggtagttaacgttgtcataacaaagttatcttttaacaattgtcttaagtctttagataaattagtcatctcatcaatagtgtctacacgcttttgatataaccattcaaaaatttgtttagctctaaatttttgttgtccgtgctcaactaaccaattttgcatttcatcatatcttaacgaatatattgattgtttttcaaaatttggtaaaaatttattttttttctttttttcagcagttatcatcttaactttcctttctttttattttagtaatgaaaaagccatctgaattaaagtcttgtggcaaaatttgtagtgtttttactttttcaccagtaataggatgcgttattaattcaaattcaaaatctttattttcctttaaaaatgtataaattacattttcattttccatttgttcaattgtgcaggttgaataaataagtgaaccgcctggtttcaagttatgtttaacattatctaatatacttaattgaatttctacaagatcattaatactatccttagattgtacatatttaatttcaggcttatgttttaatacacctaatccactacaaggtgcatctactaaaattttgtcatatagttctgaatatggttttgttgcatcatggtcgaaagtggacacattctttaattttaactttttgatattttctttaattaaaccaattttatgcttatgaatatctgtagcatctacatggccagtggatgctagtaattctgccatatgacaagccttaccgccaggagcactgcatgcatctagtatggtatcgtctttttgaacatccattaaataccctactaacattgaacttttatcttggatggaaataagtccatctttaaaagctcgagattcaatcactggtttacctgtaagatgtaaacaatatggaatgagttgatcgatatccacatgatagccttcttgtaaaagcgccttacttattgtttcaacatccgtacgacttgtattcactcttactgtacttgcagattgtactagaaatgattttgcaatcttatgtgtcgtttctattccgtaatgtgtaatccaatgctcaataatccatcttggtatactatactcaatcgttatgcgttgcttttcattcttaattgtttccaatgtcggtaagtcacttttaaatatatgacgaagtatagcattaacaatgttcccattatgctggccaccacgacgtttagcaatattaactgcttcatttataattgcgtgattaggtattttatctaggaagacatattgatataaactcatccataataattgacgtacccaacctttaattctagtcttaacaaagggttttaaataaaaatctaaagtcattttacgctttattgttccataaactaattctgtaaacaatgctttatcgacagttgcaatattatattggttaatgacttcgttaatttttaaattgctataagcattatcgtttaaaatatcttgaatagactgaaatgcaaggtctcttactgattgtgtcatactaatttagtccccactaatgaatcttgtacaccacttaaatattgagcagcaagcattcgttttttcccagataattgaatatctgttaatgcaatagcatccaaagaaccagttcctacaataattgcagtcttagtgatttctataatttcacctggttctccgttttttcctttttcaatatgagattgatatagttttaaatttttattattcatagttgtataagccactggccatggtgataatccgcgaatatgattgtgtatctctttagcacttttagtccaatcgatacgttcgtcttctctgctaatattagacgcaaacgttgcttttgaatcatcttgtggaatactttcatttgaaccatctataataaaaggtaatgtttcttttaataaatctgcacctaaaaagcttaatttatcgtgcattgatcctacattatcatcatcttcaatgtcgatggccttttgagaaataatattacctgcatctaactttttcaccatatacatgattgtaatacccgtttgtacttccccatctataatggcttggtgaataggtgctccaccgcgatattttggtaataatgaggcatgtacatttacagcacctaacttagggagctttaatagactttcaggtaataattgtccaaatgctgccgttacaattaaatcaggatttaaatccataagttcatttaactcattagaatcttttaacttttcaggttgatatactggaatgtggtatgtttctgccactttctttacaggaggaggcgttaatacacgcttacgtcctactggtctgtctggttgagtaactactgcgatgacttcatattcagcgattaacatctctagtacttttgttgaaaaatctggtgttcccataaaaattatcttactcattgtcaaaatatgcctccacttctttttcagtcaatatttttatagcacgttcggtaaatggaataccatctaattgatcaatgatgtgtagtatcatcctagctacatcatcataagcagttaattcaatctcgtgaccttctaaatcatttgcttctacagttatcattttactacgttctacctcaccaaatacattaggaagattaaccgaaccttctaagtcaatgattttctcattagattctgttttgattttaggattgattaattgcaaaagtccttctgcttccatgtcaatcatagcaacacgttgacttacaccaatttgtggcgctgataaagctgatgcttcttcagaatataaagtgtcttcaatatctaataataaacgttttaaattttcatcaaaagttgttatcttttttgcttttttaaataaaacaggatgagtcgatggaactaatttctttattgccacttagaacgcctcccgaaaaaaattcatcatattattataacgtaattcaaattaaaatgcgaccttagtcttaccttcactcttcttagataactttaattgcttttaatttttttcatatctaaaataatcatgaagacattaatatattaaatagactaaggaggtataaagaatggaagtcaataaagtgatttacattatcctagctgtctttttaggtggctttggcgtacacaaattttatgctggtaaaatgatgtctggtcttcttcatttattattttgttggacaggaattcctcatattattgcaatcatcagtgcgattctgacattactaagaccagcagatgaaaatggaaacgtaacaatgtaacctgtaaatacaaaaagagttacaccacgcagctaaacgcaaatggtgcaactctttttttacattaatatttgaggattgatatcaatctttaatgataatttatttttaatatatgcttcatgataataatcatctaagtactgtaatgcatgaattaattctggctctcgcttgtatttaaccaatatttgaaaacgatgttcgttattaattctagcaattgccgctggagaaggtccaagtacgagtgctctttctgaaagatgttgcagtaaaatttgatgtacatgtttagcagcttccattacttttttcatatttttatgcgcaatagtaaaattaattaaataataataaggtggatatttacctaattttctaaattgcatttctttatgataaaacgttaaataatcatttttttgaacatcttctattgcataatgagttggattatatgtttgaataatcactttaccgggtttttcatgacgaccagcacgacctgaaacttgtgtaagtaactgatacgttctttcactcgctctaaagtcgggcaaatttaacattgtgtcggcattaagcacaccaactaatgttatatttggataatctaaaccttttgcaatcatttgtgtgcctaataaaatatcgccttttccattttcaaaatcagtcaatagcttttcatgtgcaccttttcttgacgtcgtatctacatccatacgaataatacgtgcctcttcaaattcttgttgtaaaatttcttctaccctttgtgtacctgttccaacctgtctgatatgtgggctttcacaattaggacacaggttaggaggcaagtcttgatagccgcaatagtggcattttagttggtctgtcgtcttatgataagttaacgaaatatcgcaatgtggacattgtgggacatatccacaatctcgacataacataaacgaagcataaccccgtcgatttaaaaataaaacgatttgttcatttttattcagtctatcttgaatcgcttgtcttaattcttcagagaacatggaacgattacctgaacttagttctgctctcatatcaatgatatctattgaaggtaaagcttgttgattcactctttcaggtaaagtaagtaattgatatacatttttttctgcccgtgcataagattcaagacttggtgtcgcacttcctaatattaatgggcattgatgaaattgacttcgccattctgctatgtctctagcatgataacgtggataatcttcttgtttatatgttgattcatgttcttcatcaataataataatgcctaagtttttaaatggtgcaaagatacttgatctagcacctacacttacacgtgctctgccatctctaattttttgccattcatcatatcgttcaccatttgacaaacctgaatgtaggacagctacatcatcaccaaaacgtcgcttaaagcgtaaaaccatttgtggtgtcaacgcaatttctggaacaagcatcatggcttgtttatccttttttaatacttcttcaatggcttgcaagtaaacttcagtttttcctgaacctgtgacgccgtgtaataaaaatgtacgttgtgcattgtgatctattttttctttaatttgttgaaatgcatcattttgagcagaggttaacgttcgtttttcttctttttcaaagatacgatttgcaaaaggatctcgttcaatttctgcatcatatttttctaggaaaccttttttaactagaccatctatacttgatttagaaaatcccatatcttcaagttcttttaaaaatacatttctatgatgttcttctaaaagataagcatacacatcatattgttttaatttcttttctagtaaagctaatatatcatctggattgtatccttcaacaactcgtactgcacgctgtgtttttctttttgtatgttgagataatattgtttcttcttctattaagtgttgttccagtaaacgatttaatagatttaaatgattatttttttgcgcatctttatacttataatatccgttgttatcaaagtattttaatatatcatcttcaatatcattgtgacggactattttaaatactttagtatattttgctttaatcgcacttggaagcattgcttctaacacagaaatacgttttgaaatatgataatgactcaaccattcacttaattgaataagttcaggtgttaattctggtcgaatatctcgaatttctttaattgctttcaatctatctatattgacatcttcacttggttgttgttgtatatctataacatatccttgaattgtgcgtggaccaaacggtacaacaactcttacacccacttttataaaatcttttaaatggtcaggtatgagataatcgaatttaaaatcaacactcttagaaggaatatctacaatgaccttcgcaatcattattgccacctagtttccagttcatctaaaatttgttgtgcaagttgcactttctttcctttttttatattaatacgttgtccatctttaaagtgcatagtgagttcattatcatcagattgaaatccaatggtttgatctcctacattattcgaaataatgacatcagcatttttacgttttaatttatcttgtgcataagcattaatattttgggtttcagctgcaaatccgaccaagtattgatgcgttttatgttcacctaaatatttcaaaatgtcttttgttcgtttaaaagtgacagaaagattgccatcttgtttcttcattttatgattcaatacatcggccggcgtataatctgagacggctgctgctttaacaacaatatcttgttcttcatatcgacttataactgcattaaacatttcttctgcactttctacatgaatgacttctacattctctggattatcaagttgcgttggtcctgccacaagcgtcacctttgcacctcttttagctaaagcttctgcaattgcataccccatttttccagaggaacgattagatacaaaccttactggatcaatcacttcaattgtagggcctgcagtaactaaagcatgtttcccttcaaaagaagtatgagatctatgtgatagtttattcttatttttaaaataatcattgattattttgacaatttgaagaggttcctccatacgtccctttgcaatgtacccacatgctaaaaaaccatctccaggttcaatgaaacgatatccatcgttttttaatacagaaatattatgttgcgtacgtttattttcatacatatgaacattcatagctggagcaataaatttaggggtttctgtagcaagtagcgttgatgtgacgatatcatcagcaatgcctacacttaatttggcaatagtattagcagtagcaggtgcaacaacgatgcagtctgcccaatcacctaatgctacatgttgaatttcttcaggattttcttcaataaatgtattggtatatacaggatttctactaatggcttgaaaggctaaaggtgtaacaaattcttgtgcatgattcgtgagcattactcttacatcataattcgcttgagtaagtttactagttaaatcaattgctttataagcagcaatgcctcctgtaacaactaatagaatgttcttcatgattcgactcctttagttatatttatagtcttcacttttaaatttattatacacaactaagatgaaaaactaaaaacacgggagtagaacagatttttaattcactgttctactcccgcaagattaactgattctaaaaacgcttatataagtatattttcaattgaatcagagattgcaaaaatgtttaaaagtctgaaacacatgataacttatatttcagaacaacatcttaactgataacgaaataattttatttatgcttgaaattcttcaggtacaacaggtgaaatttttccgcttgcgatttcttctagtgcttcacctacaggttttgctgaatgataaccatttagtaatgcagtttcaggcttttcgtctaattcacgtgcacgtttagcagctgttgttgcaattaaatattttgaattaatttgtgattgtaattgatttaacggtgggtttaacattatttttttgcctccaataacatttttctatatatcgcttcaacgcgttctctttttaagtgctcggcttctacaattgattgaattctttctttagctaaatgaacttcatcattaacaacgacataatcgtaaagattcatcatttctacttctttacgtgcttcatttactctgctttgaatcttttcatctgtttctgtaccgcgaccaataagacgttctttcaaatgatctaagcttggcggtgcaagaaagataaataatgcgtcaggaaatttttttcttacttgtttcgcaccttcaacttcaatttctaaaaatacatcatgaccttcagccattgtatctttaacatattgtacgggtgtcccatagtaatttcctacatattcggcatattcaataaattgatcttcttgaattaatgcttcaaattcttctttcgttttaaaaaagtaatctacaccgttaacttctccttctcgcatttgacgcgtagtcatcgagattgagtatttatatgatgtagttggatcgtcaaatatctctttacgaacagttcctttacctactcctgaaggacctgaaagaacaattagtaatcctttttcattatccatgccttacgacctctctaagctattcttctattatttaaatatgatatcacattgttgtttacattgtatagagtgtactaggataaacttaactcatgacgctctattgttaccatgttacaatataatgaatgacaaaactgaaggtggaaaaaaattatggcttatgatggcttattcacaaaaaagataatagaatcactacaatttttagtaacaggtagaattcacaaaattaatcaacctgaaaatgacacgatcattatgattattcgtcaaaatcgtaaaaaccatcatctattattatccattcatcccaacttttcaagaatgcatctcaccaataaaaagtacgacaatccctttgacccaccaatgtttgcacgtgtctttcgtaagcatttagagggaggtattgttaaatcaatacgacaaataggtaatgatcgtagagtagaaattgacattgaaagtaaagatgaaattggcgatacgatatatcgaacagtgatattggaaattatgggtaaacatagtaatttaatactagtagatgatcaatataaaattatagaaggctttaaacacttgacgccaaatacaaatcagtatcgtacagtgatgcctggtttcaaatatgaagctcctcctactcaaaacaaacgaaatccatatgatatttcaagtgatgaggtgctcaaattcgttgactttaatgccggaaaaattgctaaacaattactcaatgcgtttgaaggctttagtcctctaattacaaatgaaattacaaatcgttatccatttatgaatcaagatacgcttcctcaagcttttgaagaagtcattgaccaaacattaaaagtacccgtgccagtatttcataaaaatcatgaaacaggtaaagaagatttctattttatgaaattaaaacaattctcggatgatattgttatctatgattctttacatgatttattagatcgttattatgatgctagaggtgagcgagagcgtgtaaagcaacgtgcgaatgatttagtacgcttcgtacaacaacaattacaaaaatatcaacacaagttaagtaaacttatagacgaatacgaaagtgctaaagataaagatacacaacaattatacggtgaactcattactgctaatatttatcgtattcaacaaggtgacgcgtctataaacgttctaaattattatactaatgaagaaataacgattccattagaccctactaaatcaccatctgtgaatgctcaatactactataagcaatataaccgaatgaagacacgagaaaaagaactcgatcttcaaattgctcttacacgtgaaaatattgactattttgccaatattgaacagcaattagaacatattacagttgatgaaattgatgacattcgtgatgaattagcagaactaggatttatgaaacaacgtaaaaatactaaaaagaaaaaacaagataaaatccatttacaaacatatatatcttcagatggtgacacgattttagtaggtaaaaataataagcaaaatgattatttaacaaatcgtaaagctcaaaaatcacatctatggttccacactaaagatattccaggttcgcatgttgtcattttaaatgatgcaccgagtgagactacgataaaagaggcagcaatgcttgcgggctatttctctaaagctggaaattctggtcagataccggtagactatacagaaattaaaaatgtccataaaccttctggcgctaaaccaggatttgtcacatatgataatcaaaaaacgttatatgcaacacctgattatgaccaaatccagcatatgaagcaggataaaaattaaaaaaataaaaatccgtagatgcttttttcaagtcatctacggattttatatatcatagcgtctatttttctggtaatgcaagttggaaacttactccaaatttatcttgcacccatgcaaactcacgaaatggtggcataggagttttaggcataagtatagcgccttctttttttagaccattaaataaacgttccatttccataacatcttcaacagtgacatataaagagatggaaggattcattggtaattcttcaccattatcggcatctatcgccatgaagacttgaccatttaatgtgaaaatagaatgttgaactgtcccaggttctccaggaccgtcttctccgtattttaccattgttaaaatctcactgtttttaaataagctcgtatataaattgactgcttcttcagcctgattattaaacattaaaaatggtgtcactttaggtatttccattgtaatcctcctataatttataattaatgtctattttaaactatttttaaaaataataaaaagttagctattaagaactttgaattaaaagtagctttaattttgaaaactttccataaacagttaaaattaaataaaagtataataggaggcacttaatatgatgcattatattctaccactattagcaatggtcatcgttttattaatcggatgggtgttaattaaaatctttatacgttaagttaattatagattgatataaaaagatacatataaacatgttgattcattatttatatgtatcttttttctatatttagattttatctttttgacgtaaacgtgctttggcttttttaaagaagtcacttgtatgctcaaaagattccatttgtgcgtgatgcatatgtttaatactttctttaatagttaatacatgtgctgtttgtttaaattctttttcactgtataaaaattgattcacatgttttaaatgattataaaatgcattattatctttgtctttagccaactttatcaccctttaagcgatacttagagattatcgcgccaatccactaatgtttgaatatcattttctgaaattttgccttcttctttagctacttcaataagttcattataattacttagcgtatagaatggtagattcgcttgtttgaacatgtcgtctgctttagctagaccataagtaaagattgcaactacacctacgacttcagcccctgcttcttttaaagcttccactgcagtaattgatgacccccctgttgaaattaaatcttcaacgacaacgacttttttatttttactttgtgcgccttcaatttgattttgtttaccatgacttttacttttagatcgtacatagttcattggtaagtttagtttttcagaaatataagcagcatgtggaataccagcagtggctgttcctgaaataacctctacattaccaaaatgttctgtaataagttcacttaatccatcacgaatgtcttgacgtactttagggtaacctaatgtaatacgattatcacaatagataggtgattttatgcctgaactccatgtgaataagtcattgggtgataaacttactgcttcaatatctaataatgattttgctatgtgttttgacatattaacctaaccaactttcctttatttttgtataactctcttgtggatgctcactttgagttattgggcgacccactacaatgtgagttgaacctaattgtttcgcgtcttctggagttgtaatacgtttttgatcattcaccgctgcacctttaggtctgataccaggcgtcacttttaaaaattcagaacccagggactttgtcagtaatttagcttctaatggcgaacatactacgccatctaatcctgactcttgcgctaattttgcataattcaacactgcttcttcaatagacgtttggatattttgttcttgatgaagcatttcttcagtcgttgatgttaattgagtcactgctattattttagtagtttcattatatttacgtaacccttttacagcatgtttcatcatttcagttccaccagcagcatgcacgttaactaaatcaacatttaacttacctaaaccctccatagctttttgaactgtattaggaatatcgtgtaacttaaggtctaaaaatatatcatgtccacgttcttttattttcttaattaaagctggtccagtttgataatataattccattcctacttttacaaaaagtggttcatcaaattgatctaaaaaatcaagaacatgattctcagaatcaaaatctaacgctataattggtaaatctctcattcattaaactcctttaaataactcacttttattttaaaaagaagcgacttgtgcttaaacataaagcaagttaacacataagtcgcttataattatggcattacatatttctcattgaaaatgtcatactttcaatgacatttgttaatgcacttgcagtatctaatgaagttaaacatggcactccgttttctacagtagtacgtcgaatttggaagccatctctttcaacttctttaccttttgtcattgtgttaataacaatttgtacatccccattttgaatacgtgttaataaatcatcttctccaccgattttacccacaacttcaacagggatattgtgcgcttctaatttttgtgcagtaccttgtgtagctaagattttataacctacttcatttaaacggtgagcaatatcaacgatttcttctttatctttatcgcttactgtcattaatactgtaccatgatcttttacttctaccccactacctgttaaacctttatataaagctttttcaagtgttaaatctttacccatcacttcaccggtagatttcatttcaggtccaagtgtaatgtcaacattttttaatttattaaaactaaataccggtgctttaacaaacacaccctctgaatatggttgaataccttgttgatagcctaaatctttaagctttgtgcccattatcgcttgcatggcaagttgtgccatttgaatatcagtaattttacttaagaaaggcactgtacgacttgcacgtgggttaacttctaatacatacacaccatcatgtgcaataacgaattgaatattgatgagtcctacaatgtttaatcctttagctaatttaattgtataatcttcgagtgtttttatttcttcatcgctcaatgtttgtggtggatacactgcaattgaatcaccgctatgaacacctgcacgttcaatatgctccataataccaggaataataactgtttcaccatcagaaattgcatcgacttctatttctttacctgttaaatatctatccactaatactggatgttctggacttgctttaacagcttgctccatataattttctaattctgcatcactatttacaatctccatggcacgaccacctaatacataagaaggtcttacaactactggataaccaatttcacgtgcattttctaatgcttctttaggagaagttgctgttttacctttaggttgtggaacatcaatttttcttaaaagtgcttcaaattcttttctatcttctgcacgatttaaatcttctagtgatgttcctaagattttcacaccatgtttagctaatttatcagctaaattgattgctgtttgaccgccaaattgaactactacacctttaggttgctctaaattaataatattcattacatcttcttcagttagcggttcaaaatataatttatctgaaattgaaaagtctgttgatactgtctctggattattattaacaataatcgcttcatatccggcattttgaattgcccaaacggcatgtactgtcgcataatcaaactctacaccttgtccgatacgtattggtccagaacctaatactaaaattttctctttatctgtaactacagattcattttctgtttcatatgttccgtaataatatggtgtagatgattcaaattctgctgcacacgtgtctaccattttatatacaggtttaatatcattatcttgacgtaattgatatacttcttcttctgtcatatcaaagcgatgagcaatcactttatcactgaaaccataatcttttgcatatttaagatattctaagtctcctggatgcgctttaagttcatgttcaatatgaataatattaaggaatttatttaagaagaaataatcaattttagtcatgtcatgaatttcttgtaatgatgtgccacgtcgaatcgcttcaccaataaagaataaacgctcatcatcttgatgactgatacgttctttaatgtaatctaagtcataattttcaccatttggtaaaccaagatgatgaacaccatattctaatgaacgaatcgcttttaataatgattcttcatatgtacgaccaatagccatcacttcaccagtagccttcatttgcgttcctaattcacgttcccctttttcaaatttatcaaatggaaaacgtggaatttttgaaatgacataatcaagtgttggttcaaaagcagcataagatgttccagttataggatttagcatctcatctaatgttaaaccaaccgcaattttagccgccaatttagcaattggatagcctgttgcttttgatgctagtgcagatgaacgagacacacgtggattaacttcaatgatgtaataatttaaggaatatggatctaaagccagctgtacattacaaccaccttcaatacctaaagcacgaatcactttaagcgatacatcacgtaacatttggtattcaacatctgatagtgtctgactaggagctacaaccactgaatctccagtatggatacctactgggtcaatattttccatattacatactacaatggcattgtcatttttatcacgcataacttcatattcaatttctttatatcctgctattgatttttcaattaaacattgagtcgctggactataatgtaatccattacttacaacttcttttaattcttcatcattatgacagataccaccaccagtacctcccattgtaaaggcagggcgtacaattaatggatatcccacttgttctttgaatgcaaatgcttgttccacagtatttactatatcactttcaggtactggaacatctaaatcattcatcaatgatcggaataattctctatcttctgcttgttgtatagattctaattttgtacctaataactctacattatttgcttttaatacaccgctatcatgtaattgtattgccatattcaaacctgtttgtccacctaatgtaggtaataatgcatcaggttgttctttacgaatgatacgtgcaataaagtcatgagttaaaggttcaatatatactttatctgcaatttctttatcagtcataatggttgcaggatttgagttcactaaaataacacggtatccttcttcttttaaagcaagacacgcttgtgttccagcatagtcaaattctgcagcttgtccaataatgataggacctgaaccaattactaaaatcgttttaatatcgtcacgtttaggcattcgttttactctcctttttattatctttaaaatctctcatcatatctaagaactcatcaaataagtaatttgagtcacttgggcctggtcttgcctctggatgatattgcactgaaaaggctggtaatgttttatgtcttaatccttcaaccgtaccatcatttaaagcaatatgtgtcacttctaaatctgtattttttaaagaatctttatcaatagcataaccgtgattttgacttgtgatatctactttacctgtgcgtaaatcttttacaggatgattcgcaccacgatgtccgaacttcatcttaaatgctttggcgccttgagataatgcaaataactgatgaccaagacaaataccaaagaatggtatatttcctaaaacacctttaatcatatctaaagcaacatcaacttcttctggatctccaggtccatttgaaagcatgacaccatctggtgacattgctaatatttcctctgctgaagtatcataaggtactacagtaacattacatcctcttgaattaagctctctaacaatattttgctttttaccaaagtctaataacacgacgcttaaatctgaacctgttgatacatacggtgtttttgttgacacagtagtcacctcatcacgaggtaactctgcagtttttaagttagctgcaagcgattcaatttcctctttattgtcggtaaatcctgcttttaatacaccatattttctaatttttctagtaatactacgcgtatctacccctgaaataccaggaatatgatattgaacaagcacttcatgtaatgttttttgttttctaaaattacttggatgcgtacttgcttccttaactactaccccatttaatgtaggtgtaagtgattcaaaatcgtctctattaataccataatttccaattaaaggataagtaaatgtaacaatttgaccagtatatgatggatcagaaatcgtttcttgatatccagtcatcgctgtattaaatacaatttcaccgattgataattgatctgaccctaatttatatccttcataatatgaaccatcttcaaatacgagatatctacgttcaaacattttacttgtcctccttaaatttaacttcaccctcaaccattgttaaaacagggttaccatatactttatatcctataaatggtgtattatctgctttagataagaaatcttcaccacgaatttctctttcttcatctaaattgataattgttaaatctgcatagctgccttcttctaattttccataaggtaaatcaaatatttgtgctggcttaattgttaagtaatcaacaagttgttgtaatgaccagtctccttttttaacaaaatgagtatataataatgggaaggccgtttcacttcctacaataccaaatggtgcttttgtcattggctgagctttttcttctttggcatgaggcgcgtgatctgtagcaatacaatcaatggtaccatctagtaatccttctaataatgcatctctatcttctttacttcttaatggtggattcattttaaaaatggcattatcgcctggaacatcatcttcagttaataacagatgatgtggtgtcacttcagctgtaacatgaatgcctgctgctttagcatcacgaattgctcttacactttcttttgttgaaacgtggcacacgtgatagtgacaattagctgcttctgctaataaaacgtctcgtgcaatttgtacagattcacaaatatttggaatgccaggaatacctaattcttcactacgtttaccttgatgcattgcaccaccataaattaagctattatcttcacaatgagcaacaactgctttatttaattttgctgcttgttgcatcgcttcatacatcattgctgattcctgaacacccacaccatcatctgtaaatgcaaatgcaccctcttttgcaagtgcttcaaaatcaacatgctctttaccagcttgacgaatggtaattgatgcataaggcaagacacggacttgtgcattttctttaattaatgattgcaactgatccatgtgttctactgtatcaggtacaggacgtgtattaggcattggacatactgttgtaaatcctccacgtgcagctgattttgttccagtttcaattgtttccttatgttccccacctggttctcttaaatgtacatgcacatctactagacctggtgctacaaattgaccatttgcatcaatgacttcatcagtaccttcatcaatattaatattttcattcatttccttgatatattgtccatcaattaaaattgacgttgatttaagttcaccattgtctaaaattttagcattttttataagtttcataattattctccttttcttgataaaagtttatctattacagccattcttaaatacattccattttccatttgtttaaagattcttgacttaggtgcttcaactagttcactatcgatttctacgccacgatttactggagcaggatgcatcactatcgcatcatcttttaaacgacgatacctttctttagttaacccatattgttcatgataatgatcagctttaaagtttgcttcatcagtaataccatgtctttcatgttgaactcttaaaagcataataatatcaactttatcaatcacatcatcaatatttacataaggagcatctaatgtttcatctacccattcatttggacttgagaacatcaccttagcaccaagcgaggttaaacttgtataattacttctcgctacacgagaatttttaatatctccacatattaaaatatttaatccttcaaatgtttcatattcttcataaatcgtcattatatccaataagctttgagtaggatgctgaccactaccatctccagcatttgcaatcggaatatttaaattttctagttcttcgtaatatgcattttgaggatgtctaataactaataaattgacgccaatactctctaacgttttacaagtgtcataaagcgattcccctttttgtactgaagaagtacttgtttcaaagttaacttgtttcaatccaagattaagttcagctacttcaaaactgcattttgtgcgtgttgaattttcaaagaataagttagatacatatttcccttcatactgagggacagtttcttttcctgatttaaaacgactcgctgtttgaataagattaaaaatatcatcgtttgttaaatattccattgaaaataaatgttccatgatgtgcctcctaaaagatcctcttttatttaatgtctgattcttctttttcttttggcaaaataagatttaatatgattcctgataatgctgctaaagccatgccttcaatttgtaggttcacaccaagactttttaaattgataagtaaatttccaataccgactactagtactactgacgcaataactaaattacgattactagcaaaatcaacacgactttctaccaacattctaagtccacttgctgcaataataccgaataataagatagatacaccacccatcactggtgtaggaattgatgaaattaatgctgagaacttacctataaatgataagataattgcaatcactgctgcaccaccaatgacataaatactatatatttttgtaattgcgagcacaccaatattttcaccataagttgtactaggcggtcctccaataatactagcaaacattgttgaaacgccatcacctataattgaacgatgtaaaccaggattttcaaagaaattacgtcctacaattttattaatcaccatttgatgaccaatatgttcactgactgttacaaatactataggcaacatgactaaaataagtccgatatgtatcgatggaacataatctttaaatggtaaatatatatctggaaaatctagccaactggctttagcaattggtttgaaattaacaatgcctacaaaaattgacacaatataacctacaataattcctattaacacaggaataagtgaaaggaaacctttaaaaaatccttgaacaataatagttactagtaaggttactaatgcgactaataaatagcttaaattgtaacccttcatatctcctgaattctcatacattgccatgtttactgctgttggtgcgagacttaatccaatgaccataataactggaccaacaacaactggtggtaaaagatgcatcaaccaaccggtaccacttaattttatgaaaataccaataatgatatacattacgccactagcaaataatgcgacaagcatatctcctaaactgtgcgtacttaaccccgtaataattggagtaataaatgcaaagcttgaacctaaataggcaggtatttttgctttagtaattaatatgtatagtaatgttcctatacccgatgctaataatgcagcagaaataggtaaccctgttaaaaatggaacaaggacagttgacccaaacattgcaaatagatgttgtaagcttaaaaacgcccattgtgctggttttggtttatcttttacatctagtactggtttgacagtacgttcaaacatttgctcattttccatgaaatgttcttcctttctaaaaaagtctctttacactatggtaaagagactaaaataaattaatgaaatattataaaaagcttctttaagttttttataacatgacataggaaaagtatttaatttaagtgagacatatcatctatccatttaataaatacattacacgctcaccattacatacttcacctttttcagtctctcgtactggtttaaaaggttagttattcaattattactgcatttctatcatctatttcttcaagataaacagatactgcttcatcttttgcagtaggtatattctttccaacaaagtctgctctaattggcagttcacgatggccacgatccacaagggcagcgaggccaatctttataggtcgagaatgtaataaaattgcatctaaagatgctctaactgttcgtccagtataaagtacatcatcaataataatcactatcttatctgtaacatcttgatcaatttcaatggcatctttagtgataggctttttcgagttttcaatatcatctctaaaatgagtaatgtcaatcgtacctgttggaactacatgatgttcaatttgtttaattttttcttgaatacgacgtgctaaaaattcgcctcttgtcttaatacctaaaagaacaagttgttcagttcctttattatattctagaatttcatgtgctatacgtgtaacagtacgttgtatagccgctttgtccataataatacgttctgacatgattacacctcttaaaagaaaaaacctcatgccttttataaagacatgaggtttaatgtatataaaaatattttatatgattagtctgatagtaatcgaacaattgaagttaatcatatttatatcattagtcaccctgtcttttgagcctctctggactctttttaaaagacactgttttgtttaattttaactgttattagcttaaatctttttagttcataagtcaatatgctttcttttaatttacgactttattctctaattttatgattctcttaatcgaatatcttctaatagcgattgaaacgcttgaggtaactcagcatgacgttcaatatattcatgagtgacaggatgtttaaaaccaataactccagcatgtaacgcttgtccaccaatatctaatgtttttctaggaccatatttaggatctccaacaagtgggaacccaatatatttcatatgaacacgaatttgatgagtacgccctgtttctaattgacattcaatcaatgtatagtcattaaaatgctctaatacattaaaatgagtcactgcttcttttccatcatcaacaacatccatagattgacggtcttttttgtttctgcctattggagcatcaattgttccataatcatgaggaatattaccatgtactaaagctgtatacttacgctttactgttttatccataagttgttctactagaccacgatgtgctacatcatttttagctaccataagtaacccagacgtatctttatcaatacgatgaacaataccaggacgtatctctccattgatacctgataaatctttaatttgatacattaatccattaactaatgtacctgtataatgacctggtgaagggtgtacaaccatacctttaggtttataaacaatggctacatctttatcttcataataaatatctaaattgaggttctccggtaaaatatcggcttcaaccacttctttttcagttacttgaatctcatcatttaatttaactttataatttgatttgattattttaccattaacagtgactaaatcatttttaatccaatcttgaaattgacttctagaccactcactattgaaatcagataataatttatcaatacgctgacctacgagtgcttcatcttctattttatatttatacgtttccactacgtgccctcctattcttttttggttgcatccttaaccaatgcaataatgacaaaaataacaccaattgttaagcttgaatctgcgatattaaaaattggaaaatcatatccaaaaatatttgtatcaatgaaatcaacaacttcaccattgaataaacgatcgataaagttacctaatgcacctgcaaataataagctaattgcaacttgcataaacgcattatatttagtttctttaatataaaatataataagtacagctaaaataataagagtaataatatagaaaaatcccattttaccacttaaaatcccccatgctgcaccattatttctatgtgaggtaatatttaaaaaatgaggaatcacttcataagaatcaccaatgttcattgttgctgtaattatttttttagttaattggtctataattaaaatcacgatggctactattaaagataaaccaatataatatttctttttcattcatgtgcctccattcagccctcaactctttgacaacactctacattatagcctactacttagcataaaaaaagctacaatcttctatgtcatatttgtgttacttttaggatgaatataattaaattgatcgacttgataaacatctacaaaacgtgttgtaatttcgtaaggttttctgaaattcatatcagagactattaaagagccatcattattgacttgttctacataagcaacatgtccatgttttccttttggataatgtaaaatagaacccttagttggattttcattgactgtatatccttgtttcttagccttattagcccaatatttagcgtcaccccattggttacttattaaatgatgatcttcttttactcgatcaaatacatagtaagtacattgacctttagcgtatgtgttatatttcataggatttttttcccaaaaatgaattgtaggttcagtcatatcttgattgtctagaccatcaaaaattgcaccgcccgtaaatatcatgcatacaaataccattaaaaaaatccattttttcatttcatcactctacctttataaaattaaatctaaattggataccatctgggcctttaatattgatatgatgtgtttctggataatgaaagtcaacgatagatagaccataagtatgttcattatctattcgctttatttttgaattccattgattcattgaaagatgacaataatattgttcagaagctaaataaaaagattcatcatctaaatatgcagaaggtactagtccaaaatagtttagataatactctcttacttcatttaatcgaatggtttttaaactaatattcccaattttactatcattaggtaaaccttgccatccgatggttgatgcatatggtaataatgaagaaacatcgagtggcttaatatcgagtctaatccattcactttcttgtttccaatcagaaatcgatttatcaacataaaacttaaacatatgaccttctggatcttcgacaaaaataaatgtacatacgttttgttctccaccattaattggtaactcatagtcatttaacttttcgattagatctgccagatggtgtgtattggataattgaactcctatataaaataaaccagcttcttgagataaaggatttcgtccagattttatctctcttaaagtaatataatggtgacgatctccaatttgatatttgacagccgttaatgtctcttccacctttttaaatcctaataattcttcatagaacggttgtaaagtacgtaaatctcttacatttaaagtgataccattaataaaatgtgcatcattatcatgaaacatagggtacctcctaaattttaaaatctctctttcaatttaaaatagctacgattaatgattattctataataaaataattaaaattttatcagtcttaatgcgtaatattcaactatttaggctaaaaaaagctttcgatagaaagaacttcatggctcttccatcgaaaacttttaaatacataaagtatactattttttagctaaaaatttattgtatattcttgcaccaacaaatgcgccaatcattgcaccagtagtcatagcaagattagtaaaaattttattaacaggatcttgtttatcttcttcttcattagctaaatgattcatatggtgtttaaacacatccatcacaaacttatgtgcattggcttgagtaaacttataaactccccatggtaatgttggttcatattcatgtaatgctacaataccttcattagtatctaatatacgcctaaattcaaatcgcgcattaccgccgtctttagccattgctaaatctccaccaacaattttatatacaatcatttcactcgtagaatcatgattatgtcgtgtcatttttaaaatgaatttctttattaatggtaattgaatattaaattcatgctcattaatggtaccatctattaaatgaagcgtaatatcatttataaattctgcatattctcttgttacatcacgcattgaataactttcaggaattttaaaacgcgttattgctctaacatctttcacttcatttttcttatcttgctttgatttaggtttagactgttttgtagttattgtttgttgttcatcttgttcttctttcagtgcttttcttacactttcttcataattcattttccctaatgatatttcaggttttatacgctcaggctgtggaatcatatcatgcactaaactatccataagtgggtataccatttctttaggtacttgcgaaatcagtctaacccaaaatcgacttaaccaaataggaataattggtaaattcaacgtaggtaaacgtttatcaagaatagccgctgtacgttcaaataattcttgataattcattaccttaggtcctgtaatatcaaatgcttcattttcttgtggagaacgttcaactaacatagctaatttatcaataacatcattaatagatactggcgcaatcatattgtgagcccagttcggtagaatcattgctggcaaacgctctatcattctttttaaaataggatatgagctaccttttgaacctataattagaccagcacgtaatgtgcttacagggatgtcataatatcctaatattttttcacattctaaccgactttttaagtgaggtgataactgagtatcatttgggataataccactcataaatataatatgtttaacaccttgcttttttgctgcacgtccaaaattatcagctagtagtgcatccatatcttcgaaattcgcttgtgtaagtttagcacttggcatcattgaatgaacaagatatatcgcagtatctataccttccattacctcagttatagcatctaaatcaaataaatccgctgatttccaagttacatttctttcattttttttattttgagcatttcttgatattgcgataatctcatgattatcttttaatttatcttttaaatgactaccgatatatccagaagccccagttagtaaaatcttgcccataattttatccctcttcctatatctatcataaacatacgagaaatattccatcacttattatgtgttataacctagttcctcttcatctaaacttgaaactctattcagctatattttcaaactattattatttaatatttatatactttaaaaaaaacgctcgtaatccttaattaggttacaagcgttctatctttattgaattaaactaaagtttttacgacttcttgacaacgtggacataaatgatcaagttcaccaacagatcctaatgcttcactataattccaacatctttcacatttttcacctgaagcatggtcaatacgaatgtcaccatgttgatattcatttccattgtctactttttcagtcacttcaacttgagagacgataaataattgttgtaagtcattaaattgttgtaaaaattctgcagctttaaagtgatcattgtttccaatcactactttagcttcaagagatttaccgataactttttcattacgtgctgcttctaatgcacggtttacatcatcacgtaatgacataaattgattccatttatctaataactcttgatcaacgtccacaacttttggcatatctgctaaatgaacactttcttctttaacatgtggtgtatgagaccatacttcttcggcagtgtgtactaaaataggagcgagtaatttggtcatatctactaaaatttgatacaacactgtttgcatgctacgacgtttatgtgcgtctttttgttcaatatacagaatatctttaccataatctaaatagaagttacttaattcaacattgataaagttttgaacttcttgataaatatttaagtaatcaaaattatcatagtgattaatagtactagcagtgaattcacgtaagcgattcaataagtagcgatctacttctaataattcatgttcaggtacactgtctgtttcaggattaaagtcgttaatattacctaacataaatcttaaagtatttctgatttttctataaacatcagacgtttgttttaaaatttcatctgaaatacgtacatctgctaaatagtctgtactacttacccataatcgtgcaatatctgcacctttttgttttactacttgattaggcacgataacgttacctaaagatttactcatttttttaccttcgccatccattacgaaaccatgtgacaataagaatttataaggcgcttgtcccctagtcgcaactgctgtagtaattgaagagttaaaccaaccacgatattggtcactaccttcaaaatataaatcggctgggaaatgcaattctggacgagtttctaacacgcctctatgagatgaaccagagtcaaaccaaacatccataatatctgtttctttagtaaattctccattagggcttccaggatgtgtgaatccttcaggtaataaatctttagcttctctttcaaaccaaacatttgagccatattcttcaaataaatcagctacatgattgactgtttcttttgtcataataatatcgccattttcagcgtaaaatacaggcaatggtacaccccatacacgttgacgagaaatcacccattcaccacggtcacgaatcatattataaatacgtgttttaccccaatctactttaaaatcagtctcttcaatcgcatctaagatatcttgtctcactttattaattgaagcaaaccattgaggtgttgcacggaaaataaccggttttttagtacgccaatcatgcggataactatgcgtaataaagtctaattttaataaggcacctttatcagttaaaaggtctgttacagctttatttgctttatcatagaacataccttcaaattgtccgccttcttctgtgaagacacctttatcatccaaaggactaatgacaggtaaatcgtatttttgacctacaacatagtcatcttccccgtgaccaggggcagtgtgtacacaaccagtaccagcatcagttgttacatgaccaccattaatgactaatgacactcgatctatgaaaggatgttgtgtttcaacatactctaactcttttcctgtaaattctttttccaattgaatagtatctttatcccaacctaatgcttcagaaacactttcagctaaagcttcagcaatcacatatttcttaccatttacattatattgaccatatttcaagtctggatgaactgtaattgctacgttagaaggtaatgtccaaggtgtagttgtccagataataaattgagcatcctcatcaatagtaccttttgaatctttaacatcaaaggctacataaatagatgctgaacgtttatcatgatattcaatttcagcttcagcaagtgaagattcacttgatggtgaccaatatactggttttttacctttataaattaaacctttatcagccatttcgccaaacaaacgaatttgagctgcttcatattcaggtttaagagtaatatatggattattaaagtccccacgtacacctaaacgtttaaaatcttgtttttgaagttcaacttgttctaaagcaaattctttacatttttctctaaactcagcaattgacatttttttgcgatcaacgccttttttagtcaatgcttgttcaattggtaagccatgtgtgtcccatcctggaacgtaaggtgagtaaaatccttgcatcgttttataacgtacaataatatctttaataattttatttaatgcatgtcccatgtgaagattaccatttgcataaggtgggccatcatgcaaaataaatgattgatttctttcatttttctctaaagctttttgataatgattatttgcttcccattgctcttgaatttttggctctttattaggtaaacctcctcgcattggaaagtcggttttaggcattaataaagtttctttgtaattcatattttccactccttaaatataaaaagaactctaagttcaattaatagggacgggaaacccgcggtaccacccttcttaactcaacttagagttctcttcttaatattataaaattttaatttgccagtgatataaaaaatagacttatattaggcttgcaccgtgtcctaactcgctgtgaaaagtttattattttttacgtgtctgacattttattaactatttatttgatgatgattcactacttgaaacatccttattttcagatgtagacttacttgtattagttgtttcattagaattgattgactgattttcctcatttgatactgtctcagttgtttcactcattggagtttcattattcgcatttggatttacatcttgtggatttaaatgctgtatgttttcttgtgtcacttgttctgcatcaaaatcataatttaataagtaatcccaatcatcatttttcaataaatctagctgtgcttctacaagcatacgaaatcttgatctaaatattttagattgacgtttcatatcttcagtttggaaagataaatgacgtgctttttcaatagcatcatttacaatcacatcagcttgcgcttttgctttagagataattgcttctgattcttttgtagcagcaatttttgtttgttctccagcttgttgagcttgaataagcgcatcacttactgattgatgaacatcttgataagatttaatattagtatctctctcttcaagcactttttcaagttgttttttttcttctttaagtctttcaatctcattacttaattgagttaaaaaatcgctaacttcagcaggctccaaaccatttttcactcttgtaaattccttatttcttatttcattaggtgtaaaagccatctgttatcctccttaaaacaaaccatcataaaggtgtttttattatttatcaatcaatatcatttacttaaatagtgtttgatacgttatatgaactttttcttttttagttttgccacctatatcaataattcgagcacgtccaaatccttgaatagagagcaaatcattgttttgaagttgaaaatcgggagaatcgattaaagtatgattcacttttacccgttttttttcaattaattgtttagcaattgatctagattttcgaatcatttcttttaaaacgacatctaatcttaaagcactgactgtactatgatgaatattccaattctcttttgattgtatcatatctttaaatggaatagaatcaagtttgactgtagcacctttaatctttgttaattccatcataatatatgattccaattgctttgtcaaaacaaactgaatcgtatcaccaacaagtatatctcctacttgttctctttctatacctaaagacattaaagttccaagtacatgttgatgttgaatagacacaaatttctcaggataattaatttggattaatacttcttcaaaatcaccttcagtaggttcaaaataactaggcgcaataattgctctctttctttctgccgattgaccaccgaaatagctcactttcatatcttcaaaactaccgacgatgacttctaatatatattgtcctctaggatctaaaaatgaagtcaatacaggtgcatattgttgattaacttgttcacatttatctaataattgatcaataagtggttgttcttcatttctaaagtgctgataaatatcgatgattaacgcctcctcttttaagtgttaaagagcctgagacattatgcatatcacaggctctactaacttattataaaattattttagtattaaataatttaatatcatatcaaaaatactttgcaatccatattgaaataatacaagtacaaataatgctacaattgatgaaatatcaatcataccaatgggtggaataatctttctaaatggctctaagaaaggttcatatatcttacttaaaaatgatccaaatttagattctctaattgttggaacccatgaagtaaagaaataaataatcattccccaataataaatttgaactagtaataatataaagttaaatatactagctaatataccaacatccatatattatattctactccttaaattattcgtaatgttgttgtgtattcatctgttcaaggtgatcggtaatactacctgccacctcaacattatcaggtgtacaaaggaagatatcagcacctacacgttgtatatctccgccaatggcataaactgttccgcttaagaagtcaataatacgtttcgctgatactttatcaatacgttgtaagttaactaatgtcgcacgacgatttttaagttcatctgcaatgtcttgagtatctgaaaatacacgaggttcaaataagcacatttttgaattttcgtaattactataacctgtaccagctgattgattcatagtaacaacattttttgaattagacttatttgatgtatttcccatacgataattcctttcttcagtattgtaattttttgatactttcttttgaggtacagtttttaagtgattttgattattctgtgttctttcaataggttgctgttgcatattacgattttgattttcttcattttgtgttacacgctgttgtctttcagcagggctttcgacttcttcttcatcttccattaggaaaaaattattaaataaatccttgatagccacggggctcactcctcttctccaacaagtttagtccctattcttataaatgtagcaccttcttctacagcaatagtataatcattactcattcccatagataaatattcacatggtgcataattcaatttaaggtttttaatttcatctcgttttaatctcaattgtttaaataactgatgtatgtagtccttatcatcggtataaggcgccattgtcattaatccaacaattttaatattgtcgaatgctttaatttgttcaataaaatcattaacttcactaagcgcaataccatgtttagtttcttcaccagaaacattcacttggataaagcatgaaatagtgtgagttgctcttttattaatttcttttgctaaactcaaacgatctagtgcatgtaaataatcgatgtcattaatcacatcttttacttttctagactgcagtgaaccgataaaatgcattgtaacatctttaggtaaggtttgttttttttctagaaaaccttctaatctattttctccaaagtgtcttaaaccagcatcatacgcttcttttgctcggtctattgtaacatattttgttactgcaatcacgtttggagcggtcttaatcacacttttttcaagatgatgattaatttccgcttgtattttttctaaattttctgtcactttcattatatatcaacctcttaactttgtaatgacataaaggattatagtgatataactgcattacactacacttctcctttttgacctataaatgctagcatcctgccagttttacctttttcaacacgataagagaaaaaaagcgataagtcttctgatgtagtgtattttgtaatattaatattttcagctggtacgccactattttttaataataaagcgttagctaattttaaatcaataccatgtcgatcagtatctcgtgtttcaatatatttgtcagaattaataggcaatgtttcaaatttctttttaatatcatcatttatttcataggttgaagaagtcgctggacctatgactacatttaaatcttgatagtcaaattctacatatttaagcatttctactactatttgaccaaatgttcctctccaccccgcatgagctagagcgataaaatgatgtttttcactataaaaatatacaggtacacaatcagcataacacatcgttaataatatatctgaatcataagtgtacataccatcaattccatataattcattacctaatgccttaatattagcgccacaatgtgctttagtaatgtgagcgatattattttcgtgtgtttgaataggaaaaacccattgttttgtaggaaagttgatagcattagctaatatctcttgatgatgcgtcacatgactaggttcatcatcaatataacgtgccatattaaatgtatctcttggatatggactctttccatcttcacgtgtagtaaaaccgagtgttaactgatcatattgtgatgtataactcaaataatgtggctgttttataaatttttccacgttgtgaaaaccaccttcacttttaagaataatcatatctagactattgttttatattttatctgcatttcgattaaaagatgtatataaatgtattatataacatatttctttttaaattaaacaaaataaaaagagcagcattctcctcagaaatcactgctccttattttatatttatgctttaatattagcgtctagttcttctagaacgtctttcttctctattacgaataaagctaggaatatcatcatctttagtagtatgacttctttcgcttagaccatcagaaggacgtgaattagatgtactatgtgtgaatgagtcttcttttggtgcactttgagttgatgtactagaagttgcacttgaaccaaaaccagtacttgacgctttacgtccttgcgatgttggtttgtcttcaaatccagttgcgattactgttacaacaatttcatcttgtaattctggattaattacagtaccgaaaatcatatttacatcttcatctgctgcatcttgtacaatatcagctgcttcttgagcttcgaataaagataaagattcgccacctgtaatgttcattaacacaccttgagcaccaacaattgatgtttcaagtaatggagatgaaatagcttttttagcagcttccactgctctattttcgcctgaagatacaccaatacccattaatgcagaaccttggttagacataattgtcttaacgtcagcaaagtctaagttcacttcacctgatacagcgattaaatcagagataccttgaacaccttgacgtaaaacattatctgcttctttaaatgcttccatcataggagttgatttatcaacaatatctaataaacgatcgttagggataacgattaatgtatcaactgccgctttcatagcttcaacacctgctgctgcttgtgtagaacgtttacgtccttcaaagccaaatggacgagttacaacacccactgttaatgctcccatttctttagcaattttagcaactactggtgcagcacctgtaccagtaccgccgcccataccagcagtaacgaataccatatcagcgccttgaatagcatcttcaatttgttcacgtgattcttcagcagctttttttccaatttctggatttgcacctgcacctaaaccacgtgttaatttttcaccgatttgtattttagattctgctttagataagtttaaagcttgcccatcagtgttaatagcaataaattcaacattgttcattccatgatcaatcatgcggttaacagcgttgttaccgccgccacctacaccgatgacttttaatgtcgccaaatgattaaatccttgttcaaattctaacatttatttttcctcctagtcttaatggccaattattcaaatagagatttcataagctttttaaatttgctttcttctttatcagatttttcatgttcatcatcataatgatgtgttccatcttgatggttgttttcgtcatacgtttcataatcatcatgtttctccgctttttcacgtacttccggctgatgattttcgtcagtgtcttcgtttttattagatttacgtttaaaccagtcaaagccacctgattttgaagtatgattgtgttcgtcattttcaatgacttcttcttcaaattcatcattatcttgataatttattgtaacataatctaataattcatcaaatgtgatactactagatattgtagaaatcgctgaagtaaattcaggttttctaattcccatttgagaaggtgtatggattcttattttttcattaaccattgtacttagtaattctttaacgcccaataagtttgaagaaccacctgtaacaatgaatccaccatttactttagttaatcctaaatctaccaacacatcaaatacttcatcaaagatatcttgcactgttctttcaataactgcacttaaatctttttgagtatactctactaattcgtcactatctacctgatcaacactgaaaacgtcttgatcagacgctgattgtgtataagcatgtccatattgatgtttaattttttcagctgtttcatatgtagtgtttaattcttctgcgatatcatctgtaatatcacgtccagctaattcaattgaatcggcatctacaagttcaccgcgttcataaaaggcgatttgagtgagatcttcaccaatatcaattacacatgcacctaattctttttcagttgcagataaaatagagccatagttataagcatctgaatagacgtccaatacatctactccacaagattctacacatttaatcatattaattagaattgacttgtgaattgcaataacacctgcttctacttttaacgagtgtcttgcaatgagttctttaggatccgaaacctcgttatctccatctacaatgaatctaatcggaaacacatcaataacttctgtatcaggtacatcatttttttgacgtataccttccaatactgtttcaatatgtgatccactaatttctgtatcttcgtaaaaatcaatttcgttttcttcatcgtacacttcagtaccaatgataggtaattttaagaaaacttcttttatatccacacctgatgcgatagaagcttttttaattgtatctttaattgcttgtttcgcaatatcaaaatcatcaatcaatccattcttaataccgctagtgtaggtttgccctgtacctatcacattaataccattgtgaaatttttcgcctactattgttttaacacttgatgaaccaatatctatgcttacatagtaatgttcctccatagataggcacctcctgacaaaatactattaaaatacactatatttagtttacaatacgtcgtttagcttgtgaactataaacacatattattatcgaaattttttaattatttgtatccgattgttcgcttattttatttaatgcactttgtaattcattttttgcttctgtttcttgctgtgttttttgacgaacattttgatcggacttagaattaatactgctattttcattatatggaataaatgatgctcctacagataaatcaatatatccttgtgtttttaattgacctgaactatcttttgcaagagattgagacatttgaggataatactcgattttgttagctagagtattgatgtctcctactacttgcatgccatctttcatatataaaaggactcgattttgttgattctgtaaaggtgcatattttatttctgaaatcatatctctcgtttcattagacattttagataatgctttcgtgatactatttaaattgtcacctttaaaatcttctaacacaggtgcactattcgcaatatcaccattataattgtctaattttttatttccttcaattattggcacatatttatttttatcttttacaatacctactaaattattttcaataattttaacatttaaagtattaggcaactgtttattaatctgaacatctttgattaatgaatttttctttaaattattgatagctttgcttttactaaaagtataaatgcgtgatccttttttgatatttaattctttttcaacttgactatcacttacattatgattaccactaatattaacatgagaaattctacttaatggtgtaaacatatatagtagaaataatataattaaaagtattaaagtagtaacaataatatattgaatacgtttttgtcgctttcttttatctatcttttgttgttctcgtttttcagctaccgttaagtgactatatttatcattttgaaatttattgcgtttttctcttaaccttgtttttacttctttctttaaattttcacctttatttttcgaagaatttaaagatttatttgaccttctatcatttgaaagattcttttctttttggagtctatcttttgatttaacatcatctttaatttttttatttttatcattttctaattcagttttgtctttatcaaatgaacgcttgatagaacgaatctttttatttctattgccccttgtatcatccaattacttcacatcctttaattaagatggtaggtatgcacggaaactttcaataaatctttcgccacgttcttcaaatgttttatattgatcccaacttgcacatgctggtgaaagtaaaacaacctcattaggttcaatgacatcttgaactttttttactgcatcttctatatcaactgctttgattacttctttaccttgactattacctaatttagcgaatttatcttgagtttcaccgaaaactaccattactctaacatgtttcatgtaaggaattaattcatcaaatccattacctcgatctaaaccaccacataaccagataataggttgtttaaatgaatttaaagcaaactgtgttgctaatgtattggttgctttagagtcattatagtatttatttgttcgattcgttccaatatattgtaatcgatgttcaatacctgagaatgttgttaaactatctacgatagccttaattggcacgcctgcaagtattgcagctaaaacagcagctaaaatattttctaagttatgttctcccggtaaaactaagtcatcaatattaataaggttaacattattataaacgatataattatctttaatatagatgccatctacttcttgttgagtagaaaaatataatgttttagcttttaaattttcagtttcaattaaatgacgttgatgataattacaaatcaaataatcatcttctgtttgatttttgtaaatacgtcgcttcgcattttgataattttctaatgactcatgataatctaaatgagcagaatagatatttgtaatgatggcaatgtgaggtctgtaatgttcaatgccaagtaattggaatgaagataattcagtgattagatattcatcaggtgacgtttcttgagctactttagaagcaacatacccaatatttcctgaaagtcttccagttaatctactttttttaaacatatctccaatgagagaagttgttgttgttttaccatttgtaccagttacggcgataattggagcttcagaaattaaataacttaattctacttcagttaaaattttaagacctcgttgatatgcttcatcaataattgaaactgtataaggtatacctgggtttttaacaataattgggttgctatcaagtaatgataatggatgaccaccatcaacaattttcacccctaatgtttctaagtcttttgcatggggatctttagataaatctttcccatcatttacagttacatttgcacctaatttaactaataacttagcagcttcataaccactttttgctaatccaactacaagaacatctttattctctaatcctgtataatttagcattctaatgcactcctatccataatccaattaatcctgaaattaaccccacaagccaaaatactgaaacaactttccattcactccatccgctaagttcaaaatggtgatgaattggtgtcattttaaagattctttttttagttaatttataagatgatacttgcaacattactgataatgtttcgataacaaatactaaacctataaaaagtaatgaaaattcttggtttaacatgattgaaattgtagcaaaaatacctcctaatgctaagcttcctgtatctcccataaatactttggctggatttaagttatacggtaagaaaccgagtaatgcaaaaatcataataatacaaaaagtaccaattgcaggggcatttaacatgaaactcataattgcatacatagtgaatccaataattgataagccagttgctaatccatccaatccatcagttaaattaactgcgtttgaaaacccaacttgccaaaaaacaataaaaataacgtacgcaaacgacaatggaattccaaaattagtaaatggaatatttatacttgttgaaaattctattaaatgaaaaacatcacttagaatgaaaaatataattgctattgcaatttgagctaaaaatttctgcttacttgtaagtccttggttattttttttaactacaataatgtaatcatcaataaagccaatgagtccaaatcctattgtgacaaagagtaatagaataatgggattagaatgatctgtgaaaaatatagcaatcatagatgtaataataatactaattaaaaacgttaaaccacccatggttggtgtacccgtttttttcatatggctttgaggaccttcttcgcggatactttgaccaaatttcattcgtttaagtgtcggtataagtacaggaactaaaataaatgtgataagtaatgcgataatcgcaaatataaaaagcatggtaatctcctttatgtattttaaatttattcgtttttcactttatttcctttataatcttatcaattttcaaactaattttatatatattatgtaagaaattgagattataaataaggtatccataatatatgacaccttatttataatcatttaaaatgacgtcatttgttcttatgaatcgtttttatcattagacgttgtatcagttgaattatctgaagtgttatttgaatcagatccactcgaatcagttaaagatgtattatcattaggatcatcagtagataattctatttcaattttcttattacttttgagtgttgacccactcgctacagattgatttgttacgtatccactgcctttagtcgtaacattgattccagttaattcttggaaggctaggacatcgtctgttgtccaacctttcatatttggcatagtaatatcgccatctgtcactgctaacactttactattcggtaataattttgtattagctctagtagattgagcttttattgtattaccattaccaataatgacaggttgtaaatcttttcctttaagactatcttgtgctttttgacttgattgccctacaacatttggcactttactatactgtgctgattgagtctcatcttttttagagcctacatttaaatacttaagtgtattttccatgataggtttaaaagctttacttacccctaattcatatgcttcttgatcatttttctgagcaagactcataccggcataaacaataactcttggatgtttttttggcgcatctcccataaagcttacaaagtagggatttgctcctttaacgtatccactaccattttcattaacgacctgagcagtacctgttttcccttcaatatcataaccatcaatacgataattggaagcatgacttttatcactatttactactttatctaattctgtttcaactttatccgcagtttctgaagtaataggttttccaactatattcttttcacctttatagaatgttttctttgaaattggattatctatactttgaacaaaccaaggttttaacatatttcctttattaaagaaagctgattgtgcttgtatcatttgtacaggcgtcactgtggtcgattgaccgaatgctgatgttttttgttgtaattcatttgaccaagcaatatttccttttaattctccgtcaaacataccatttgtagatttaccaaaaccaaagcgctcgtaccaagatttcattttatcagcaccaactaaatcttgaagatgcatcatcaatgtattagatgaatatgtgaaacctaatgacattggtatttctccccaaccggttttattccagtcagaaattcttgaacccataatatcacgatgaccagattcatatttttctttaggattaaatttaccttcttgaatggcggctgctaatccatatgatttaaatgttgacccaggctcatatgcattttgatataaatcattagcccatttttttccaaagtctttacccgtttcggggttgaatgttggacgttgactatatgcaagaatttctcctgttttagcatccataaccactgcaaataaatcttttggttcatatcgtttcaccatatcatcaagagcctcttcgacaaatacttgtatatttgaatcaatggttaaatgaacatcatcaccacgttttggcgctttttcatttttactgtttggtgcaatataaccccaaatgtcatgtatataagatagcgagcctttctgtccatttagataactattaaaaatcttttctacacctaatgcaccatttaattccccagtatcaggatttttttgagccataccaattaaatgagaagcaaaattaccgttaggatagaatcgttcagtttctggatataaggtgattcctggtaagtccattttatcgagtttaactttatcttgatatgttaaatttgtccctttctgtccaaattcaacttgaaaggctttcttttgattaagacgtttttcaatttcatcaggtttcatatcaataatttttgataattgttttgctgttttctttttatctttaacataccttggtgtatcaccaacttctccagcatttttatcaataatagcaactaatttatatcgttgaacatcttcggctaaaattttaccgtttctatcgtatattttccctctttcaggctgttcttgcgtttttacgagatatttttcattagcgcgcatcactaaattttgtccatctgaatgtccagttatcatgatatatgaatatcttaaaaccaatacaaaaaagagcagtccgaataatccaacaaggaggactgctcctaatttattttttctaattttaatttttcgcttcgccattagtacgcactacctttacattatcgttctttaggctcataccttgttttttagcctgatcgtaaatgcgctcataagaagaatttttcttaatttcagattgaattgcattattttcattagattgttgttcaatcttttgatctagctcggcaattttatcatttgtatcgtacgcatccatttttaaagatagcatatagattgctagaacagcaattgctgtgacaagcgttatgtataaaaatttctcaaatcgcgtaagttgaacaacaacctttttagttactgttttcgtctcagtttgtgtctttggttgttctttcggtatgctagtgtgctgaatgtgttcatatggttcgtaaattttttctacagccatcctcaattactccttattttaatatttcagcaacacgtaattttgcactacgtgctctattattttcgtctaaatcctcttctgtagcagtaattggtttacgatttactcgttttaacttaggtgtataagcttcaggaataattggtaaccctctaggcacatcaggtcctttttcgtattcttggaaaatttgcttgcacaatctatcttccagagaatggaaagtaatgactgaaatcctaccttttactttaacatgctcaatggcttgttcaattgaatcttcaaacgcagatagttcatcgttcactgctattcttatcgcttggaaaatgcgtttagcaggatgaccaccttttcttcgagctttagctggaataccttctttaataatgtctacaagctctaatgttgtttcaataggttgttgttcacgatgtgcttctattcttctcgctatttgtttagaaaatttttcttctccataacgataaaagattttaaccaatacctcataaggccaatcattaacaacatcatatgcagttaattcttgcgtttgatccatacgcatatctaactttgcatcatgatgataactaaatcctctttcaggtatatcaagctgtggacttgaaacacctaagtcgtagtaaataccatctactttttcaattcctaaatttttcaaaatatcagttaattctctaaagttattatgtacaaacgtgaccttgtgtaagtgatctcttagtacttctttagcattttctaaggcagtagtatcttgatcgattgcaatcaacctaccgtcatcgtttaattgatttaataaatagagtgcatgaccggctccaccaagcgtacaatctacatatatgccatcctctttgatgtctaattcatctattgtttcttttagcataacgcttacatgatgaaacactataaattcctccattaaaaatcaaaatctatcaaatcttcggcaatatcttcaaaactttcttctgattcttcgtaaaattcattccaagtttctctatcccaaatctctatacgatttgagacacctattaccgtacattcttttgttaaatttgcgtatttcctcaaattttgaggaatgttaatacgcccttgcttatctagctctacttcgatagctccagagaagaacatacgcataaacttacgtgcgtctttttttgtcataggtaaggttttcattttctcttctatctgttgccattcttcaagcgtgtagccaaacaaacatttatcaaggcctcgtgtgataataaaacgttcatttaagtcatatctaaacttagatggaattatcatacgtcctttagcatctaattgatgctcgtattctcccatgaacattattaccacctcaccttattaataatttaccacatctcaccactatcctccactaattatgtaaaatatcttaaaattctttaatttgacataaaaagacccatattatctattaaaataatatgggtcttttcctcataaattaaggttttataactatttggttaaatgtatatttaagtggaggataagtggagggactaaacacatctatcccaaattcattcatcatttgaagtggattccaaattctttcttgtaggccacccattggatgcaatacatgttcaatctctctaaaatgtttcatacttatatcgttatctctttcaatgttaagtaaatagcgatttaataaatattcaaattgtttattatgaatgtcataatttttctttactaaattgatattatcatgattatcattaacctctttacgaagtgattcgtatattttggcatgattctcttttaaagactctacttttttaataaatgtatctgaggctttgctacgaacgaatttttctctatccgtttctataccattcataataacatttttagcatttaacttatactgattaattagtttttctattctaattggtaaataagtgattttcattcttggtaaaacaataggcatttcaacatctaaaattttaaatacttcattcaattcagcccagtatttaatttcacttggtcctccaataaaagctaccgtattaaatagccattcttccattactggtctagttacaacattattagaaaaacgagttggttctttttcaactaattttaacaattcatctttattatatgtaatatctgatttactcaatttgaatacatcatcttttttagtaattagttgacgcatactatcttcatgaaggaacagatggacattggtatctgtttcaatcattttgtttaaacctgattgtgtagttaatttttgtgtttttctaaacgcttggttaatttcattatgtttttgaataatattttttaataatggcttctccaattcacgaattttttcatattgagcatcaataaatagtacaccgtaatctttaaatacttcttgaagtaaccctttaaaaatatcagtccaattattgtacttttctataatctctaaacatacttgataaagtgcgttagtatgtttcgtttcttttaattctttaaaaaattgattaagtgcttcaatcatctgttccttttctagaatatagcgagaaacgcctgtttcaggcggtgtcattgtatgatattttactttatgtaaatgagcatcttttgcattataagcatacgtatgatttacttcttcaaagtcatgatcttcacctgcaatccaaaaaacaggtacaacagtttgttgatatgtttcagttaattcacgacttaaattaacaattgaaagaattttatgaaacgtatataaaggtccaccaaaaagaccagcttgctggccaccaattaccactttagctccttcactgagtgcagtaagatgagtctgttgaatttctgttatattcaaatctgacatatatgatttaatcacttgagcaagttgttgctctctaccattattaggacgatccattctttgatcaaaactagatggtttgactggattatattgataaaatttcaataatgtttcatcactgttttctaatttagtaataaatgaatctttttcttgaaaattagttactttacagttcattcccttactccttcaatataacattacttattcagtataaagattatatccctagatgacaattttacggcttaactattgaaattcacatccattttatcagattataagtaattaatatgttattaaatgaaaatcgtatattaatgacgatacaatatatataaagaatttaaatgatgatgagaacatgactaaagttcaacatcttgaaataaaattaaaaactgttgaattatttgaggcatttagagaaattgataatgaagacttgcataaggagtcaatatatttgtatgatctctaaacaattaagctataaacgctatttgcataaataagcctgagccatttagctcaggtctcttattaattattctttaactaaattaaccaattcatataaagattgtatttcataatctggtacaatatcactgttattttctttattacgataattaaaccaacatgttgtaataccggcattttttccacctagtatatctgatgtaagagaatctcctactattattgaagtctttcttttttcttcaccaattctctcaaagatataatcaaaaaattcactcataggtttttgatatcctgtttcttctgatatatatactccagataagatgtctttaaactctaattgagcaatacgacgtttttgggtatctgtaacaccattagtcacaataaacaattcacattcttggcttaatcgatcaattgtttctaaagtagagttgaagaattttaatggtgctttagctagttcgtctctaaataaaacatcggcttttttaccatctacgtctataccatactctttaaaataattaataaaacgatgtgttaatacttcttctttagatagttcatttttttgaaatgcttcccaatgattttgatttactttcttaaaatattgaaaatcttcttcagttggataatgaccgaaatgatgtgccatttgatgaaatgctctatcttctgcatcaaaaaagtccacaattgtatcatcaaaatcaagtaaaatagtatcgtatttcatttttatactcctaaattatagtatgtatattattttagcagatttgtcatgattcattaaataatactaaaaaataaaaacacttaaggattaatccttaagtgttgaatacttgctattaagtattagaaaccaaatactttacctaatacacttgcaccacttgatacaatgtcaacaatacttgtacctaattttgtccagtcttgattttgtgctgctgttacagtatttgcaattgcttctgctaatttagtcatttgaatttccccattctgtttttatttttaaatattattacgttagaatcctaagtatttacctagaatgcttacgccacttgatacgatgtcaacaatgcttgtacctaattttgtccagtcttggttaattcctgcgtctactgtatttctgattgcgtcgaataatttatccatattaataactcctttatacgtaattaataattaattaaaatccgaatactttacttaagatacctacaccacttgatacgatgtcaacaatgcttgtacctaattttgtccaatcttggttttgtgctgcgtctactgtatttttaattgcttctactaatttagtcatttgaatttctccattctgtttttatttttaaatattattacattagaatcctaagtatttacctagaatgcttacgccacttgatacgatgtcaacaatgcttgtacctaattttgtccaatcttggttaattcctgcgtctactgtatttttgattgcgtcgaataatttatccatgtttgttatctcctttgtactatttataattatctttaaattagaaacctaaatatttactcactaaacctacaccgttttctacgatactaacaatacttgtacctaattttgtccaatcaccattaatacctgcagttactgtatctttaattgcgttaaataaaccttccattttatacactccttagaaattaattggtaaaattctaaaacgataggttactgtattgcttgctttgttttgtttaactatcgttttgttatctttactataaagggtttctttagatacttgtgacattttccgtaacttatacttaaatcatcaaaactgtataatttaaaaatttatatttacagttaggaattcaaatatgtctatttcgtcaaagttttttagattatcaaaattaaatatttaaaaatatttaatatataaatatatgatataatacaaaagtatatatttttattatatttattctaataatttaattaaatggtgataaggtggtgatgttaaaagtaattattacgtaaaatatgaatatgaggatgcatcaattgaattaggaaaaagcaaacaataaaagttaaaacgtatatttatatattcttttttaaatgttaaatataattaatttaacttatatattttatttaccattttaacatgattatttatttacttattcaacaaataaatatctaccttctgatattcaaaatctataattaataaacttttattcctaataatagtgtttaatgaatactaaaacacataacttaatagtaatgtcattttaataatttaactaattgaggagtactcataatggaagtaaatcaaaataaaaaagaaactaatggctgtttaagctgcctaggctgttttggtatcatctttttaattttattattgattggtggctgttctgctatattttcagatgataataacaacgataatacagataaaataagtgaagaaaaaaataagtctaaaaaaactgaagatacaaataaaagtaatacttcaaaagaaagtaagaaaaaatataatgagaatgaacaatctgtatcacaaaataatagtattaaaaaatctgaagaaaaagataaagataatgatgaatccgacataggtacaacgaataagataccagtaaaattaagttctactgttgatggtgatactgctaagtttatctataaaggtaaaaccgagacatatagatttttacttatagatacacctgaaactaaacatccaagagttggtaagcaaccatttggtcaagaagcatctgatagaacagctgaattattaaataatgctaaaaatatagaaatagagtttgacattggtcaaaaagaagataaatataatcgaaaattagcatatatatatgttgacggggaaatgctaaataatattttagtcaaagaaggtttagcaaaagtcgcttatgtttatccaccaaatacaagatatttagaaactctagaatcatctcaagaacaagcaaaagctgaaaaaatgggtatatggagcctagattcagcatttaaagaggataatgaggataataaagaaatgaatacatcaaacaacaatgaaaacaacgctatcgaaaatcaagtcgataactctttatcaaatgatagtcaatctaacgatactgaacaatcaactagcaacgttgaaactttccctaattgcactgcattaagaaaagttcaccctaatggcgttccttcaaatcaccctgcctatacatcaaaatttgatagagatggggataattacgcatgtgaagttaattaatctttctatattttttagtaagataattctcaacataaaataatcattataggaaattgtagtgtatataaatttggttattgaaactagttacgctaattatgttattcaattttagtcattccgagtatttgaatataaagatatatgaatattacatattaaaggtggtggtgctataaataagtggacgatgcaccttagaatacaaatgaatataaaagcctaatctacatataggagataagtcatggaagaaaaatttaataatgaacaagaagaaagacaatttagacagtttcaagaatatcaaaaacaacaagaagaagagaaaaagaaaaaacgtaaaaaaggttggctttggggttgcggtggttgtttagttttattaatcctattaatcattggtcttacatcatgtactggagcctttgtcaacgaagtagataaacaaatgaatgatggtaattcagaagttaaagaagacaaaaatgcttccaaagaacagacagcagcattaaattcagctaaaaattatgcggacggaatgcatatgtctaaacaaggaatttatgaacaattaacttctagtgctggagaccaattctcagaagaagatgcacaatatgcggttgaccacttgaaagctgattataagaaaaacgcattagaaagtgcaaaatcttatcaagaagatatgaatatgtctaaagatgcaatttacgatcaattaatttcaaattctggcgataaattcacagaagaagaagcgcaatatgcagtagacaacttagataagtagaatgatgagggtacttggtacccttttgttttactctatcacatttgagccattaagggtttataagttgcacagaattgattagtgttatggtaattgtttaattaaaatatttaatcagaaaggatttggttctatgtttgaaaatcttcttgcttctattggaataaactctgtgaaggttgaaactttagtaaaaaatagaagtattcatagtaatgatactttggaaggaattgtaagaatagagggtggtaattctgctcaaactattaacaaaatttcattaactttagtagaaagatatgaaaatcctgataaaaagagtcaatttcctgttttagaaaatgaattacaaacatttacactacacacaaatgttgaattaaaagaacaccacacaataacagaagaattcaaatttaatatttatgaatatgaatttaaaagtgaaccaaaacatttaatattaaaaacacatgcatatgtaggttattcagttgatgcttatgatgaagataaaattgttttcaaataagaaattcatgtttttataaaatcttattattaaaaataaaccaaaggggagatatataatgaaaaaattcttagctttaatttttggcagtgctttaattcttggcgcatgtggtaatgatgacacatctaacgaaaattctgatactaagtcggaaagtaaaactgaaaagaaatcagaagataaaaaagaaaataaatccaaagaggataaaaagtctaaagaagaaaagaaatctcaagaaaatgaagataactctactgaagaacaaaatacttcaaacgtagaagaaaagaataacgagaaacaaaataatcaaagtgataatgaacaaaatatacaagataactcatcaagtgaaaaatctcaaaacacacaaaatgttgatgtaacaaacattaaagatagaggtactcttgagtcagttatctacggaaattatagtgaaacagctaaaatccaagcttataacaatgcagtagctaatggtgtcattcctcaaggtaacgttatggaagggcctgctagtgcagcttatgaaagttctttaagagttgagagtggtcaagaaaaatcagtatatgatcgaccatatgaagaagactttgaacctgatgaagatactgatgatacagattacacgaatgatgttcaatcatcagattcatcatatccacgttcacttatgcaaattaaagaggaaacgggtaaatcacctagagatttcacagatgcagaaatggctgaagcacaagcatatgctgatgcacattaacttaatattttcagggtagttcgcctacccttattatttttttaaggagaagtgataaaaatggcttcatttacagtaacaaaacgaaaaaataagacttctacatcatggcaatatgatgtaaagcacccttcttttaagtcaggtaagaaacgtaaatcaggatttaaaacaaaagcagaagcgacgaatgctgcacaacaacttattagagatttagaagatggtaaacaagtagatagtaatagattgtttaaagattattataaagaatggctcaagttgaacggaaaatatgaattatcatcaaaacagcaatattggtatgaacactcgcttgatttatttttaaagcatttcggtgaagatattaaaattaaagatatcactcgaagtgagtatcaaaaatttatatctaattacgcacagggtagaacttcagaaacagttagaaaagttaatctttatttatctagtggtattaaagatgcagtgtatgatggttatatcaaaaaagatccaacatataacgttaaagcaaaaggaacaaaacaagctaaaaaagaagatgtaaaatttttaacgattagacagtatgaagagttaagggagcattttaagttaagaacagataaaagtacgattatgttgtatatacttttaattacaggtgctagattttcagaagtaaacagaatgacctatgatgacttgctaataactaaaggactcattcacttgccaggaactaaaacagaaaatgctgatagatttgtcgaagtttctaaaaatgatttaaaacatatatacaaggcattagagacgcatccacacagaattgataataaattatttggcttatctcatgcagcaatttctaaagtatttaataaagccaaaaagaaatataacatcaatgaagatgtcacaccttattcattaagacatacacacgcaagttacttgattagtaaaggtattccgattgaatacattagcaaaagattaggtcacgcaagtatagctatcacattagatgtctatacacatcttcttgatgaacataaaaaagagcaaggccaaaaggtcagagaaatattttcttgacacttatttgacacttgctcgctttaaacgttgatatatcaacgggttatagcgtcctgggagggattcgaacccccgaccgatggcttagaaggccattgctctatccagctgagctaccaggacattattttttaacacaagtattattatatctaaagaaatcttatttagcaatagctttaatataaaaaaagtttatattttccactaattacgtataattgcaactaatcacatacttttttcgttgctatttagttaaactaaatagctaaatgtttggtaccaaacttgaaattagataggactagactatcttgcattgtagtcctagcccttttaatagttaattaatttcaaattctattgattgaatgacttgatgatctctatttctaaaattcagcgtagcttttttactttcatcctctataagtagttctgcgtacgtttcttctatattactacgcgattgtgaaatactaccaggatttataatatggacgtctcctaatttttcatatttagctatatgtgtatgcccataaaacgcaaattgacaaccaagagattgtgctttttcagccaaacgcatacgcgtttgatttacaccataaagatgaccatgggtgtataatgctttaacactgttcttttcaataatgtcttcatttggaaattcaggataaaagtcacaattaccttttacacgttgatacaagctcaattcagtatcgttatatttaaattcagaatctcctaaatgtaagcatatatctgcgtctttatgatagtcgtataattcatacagaattccagattctgtatgattatcacttacaattaaccatttagacattttagacattatttttcacgctccaaatattcatttaaagctttaattgcatttccacgatgactcacatcgcttttttcttctgtagttaattcagccattgttttgtttttttctggaagataaaaaataggatcatacccgaatccataatcacctttacgttctgttgtaatttctccggatacagttcctttgaatatatgtgttggttcatttggcgcactcatactaatcacacatacaaattgtgcctttctatttgtcttaccttctaactttttaagtactttatcaatatttgactcatcatttttctcaagaccagcataacgtgcagaatatacaccaggctcaccatttagagcatatacttctaaaccactatcatcggcaatcactcttttattgagtgctttagctgccgcttcagattttaatcgtgcattttcttcaaaggtagtacctgtttcttcaacatcaaagtcttttataatttctgaaatgccaataacattatcatttggaaaaatagttttaaagtcatttattttacctttgttgttagaagctataacaatgtctgccacttaaatcttcctttcaattctgttttaaatttaatctacttttatacgttcaacttctacatctaattttaaccattgagaaatgatatgtttaatatgaaccgtatcacctgttgcaaaaaatcgatgttttggatgttgcgtatagcttgcatgttcattactaaacgtaagtaatgcacttacttcacgtgcagtttcaagcccagaagaaataacttttttatttccaccaaaataatcattaatgggtttatataataatggataatgcgtacagcctaaaataacagtatcggcatctgtgttacgccaatgttttaaagtctgatgtattacaatactagttattgtagggtcatcataacgcatttgttcaacgaggggtacgaaacctggacatgctaccccatatacttcgacatttgggtttattcttttaatatgatggcggtaagcttctgatttaatcgtgccctcagtacctaaaattaaaactttttgattttttgtagtcataatagcggttctagcaccaggttcaatgactccaataactggaattggtaataactgctgtaaatgttctaacgccactgcagttgcagtattacaagcaatgactaacatttttatatcaaattccatcagtttattagcaagttgcgtcgtaaaagtttttacttcttctccaggtcttggaccgtatggacaccttgcgatatcgcctaaataatatattgtctcattaggaagttgtcgcataatttctttagctacagttagtcctcccactccagagtctatgacaccaatgggtttattcatttacattcatccttataatacataatacatttattttaccatagacaaacctaatcattcattaattgatatttttgctcattttcattttactaaataaacatttatatccgtattgaattccccattaataaaaaccagcaaagtttttactttgctggcaaatatgtcatatttaatttacttgatgatcagaaccaaagaatgatttaaacatatggaacgatgtttcacggttcattgctgcaattgacgttgttaatgggataccttttggacatgcattaacacagttttgagagttaccacattcttgtaaaccaccttcactcattaaagcattcagtctttcatctttagtcattgaaccagttggatgtagatcaaataaacgtacttgtgaaatagcttgcgcaccaataaatttattattacgtgttacattaggacacacttctaaacatacaccacatgtcatacattttgataattcatatgctgtttgacgtttcttttctggaatacgtggacctgggcctaaatcataagtaccatcaattggaatccaagccttcatacgttttaagttatcaaacattcttgtacgatcaacctgtaaatcacgaatgactgggaatgtactcataggttccaaacgaatcggctgttctaattggtcaacaatggctgagcaggcttgacgtgcacgaccattaataaccattgaacaagcaccacatacttcttctaagcagttcatatcccatactactggcgttgttttttctcctttactattaacagggttgcgtcttatttccattaaacaagcaatcacgtttaaattctctttataaggaatttcaaatgtttcttcatacgcttttgcttcttgattatcttgacgtttaataatcaatttaactgttttttgcgtgtgtttttcttttttatgtgttatttcttgattatgttgttcatctgtatgacgtaattcttctggagtttcttttactgattgattgttagccatcattttttacctcctttagatttactagtatagtcacgtttacgtggtggaattaaactgatatcgacaggttcatatgtgaatttaggtgcttcatattcaccttgatattcagctaaagttgtttttaaccattcatcgtcattacgatctgggaattctggtttataatgtgctccccgagattcatttcggttatacgcaccaattgttatgacacgtgctagttgcaacatgttccataattgacgtgtaaagaatacagcttggttactccaagtttgtgtatcttccatatcaatattttgataacgttccattaactcaacaatttttttatccgtttctaataatttgtcattttcacgtactactgtaacgtttgctgtcataatttcgcctaattcacggtgaagtttataagcattttcagtaccacgcatattaagtaattcgtcgaaacgtttttgttcttcatctacacgattttggtaaatactgtcatctaactcagtatatgatgtttcgatattttcaacgtatttaattgcatttggacctgctactgtaccgccgtaaatcgctgataataacgagttagcacctaaacggttaccgccatgttgagagaaatcacattctcctgcagcaaataaccctttaatagttgtcatttgatcataatctacatataatccacccattgaataatgtactgctgggaatattttcataggtactttacgtggatcatcaccagtgaatttttcataaatctcaataataccacctaatttaacatctaattcatgtggatctttatgagataaatcaagatacaccatattttcaccattaatacctaatttttgattgatacatacatcaaagatttcacgtgttgcaatatcacgtggtactaagttaccataatcaggatacttttcttctaagaagtaccatggttttccatctttataagtccaaattcgaccaccttcaccacgtgctgattcactcattaaacgtaatttatcatcaccaggaattgccgtaggatgtatttgaataaattctccatttgcatatttagcgccttgttgatacacgatagatgcagctgatccagtattaatcattgaattcgttgttttaccaaaaataatacccggaccacctgaagccataataacagcatcagaaccgaaagatttaatttcagaagtagttaaattttgagcaacaataccccttgctgcattttcatcatctttaactaatcctaaaaattcccatccttcatacttagtaactaaaccatcaacttcaaaagaacgaacttgttcatctaaagcataaagtaattgttgtcctgtagttgcaccagcatatgctgttctatgatgaagtgtacctccgaaacgtctaaagtctaacaatccttcatttgttctattaaacataacgcccatacgatctaataaatggataatttttggtgcagcttcagtcattgctttgactggtggttggttcgctaaaaaatctccaccgtatactgtatcgtcaaaatgaatccatggtgaatctccttcacctttagtatttaccgcaccattaataccaccttgggcacatacagagtgcgaacgtttaacaggtacaattgagaataagtccacatgtgcaccttgttctgcagctttaattgttgacatcagccccgcgaggccacctccgacaacaataatttttttctctgccatagaattgtcactcccctaaaatatatctgaaactaacctattgattccttttataactatgcttttattactttcattttttatgcaaaagctaaaattgcagtcacacctatgtatgacagaattaagaaaataattaatgaaacccatgtgaaaatacgttgtgattttttagattgtaaaaatccccatgttactaagaatgaccaaataccattagaaaaatggaaaatgacagcaataacacaaataatgtacacgataacccaaattggattttgtaacgtttgattcatcatgtcataactgatttctttaccaaagaaaagtttttgtaaacgtgtttgccataggtgtacaaagatgaatacgaaagcaataatccctgttaacctttgtaacgcaaacatccagtttctaaataatgaataatggccgatattttctttagcagtaaaagcaatatgaataccatataatccatgatataaaattggaatgtaaattaaaataagttcagctgctaataaaaatggtaaagattccataaagcctgcagccttattaaaagcctcagctccttgagtcgcttggtggttaaccattaaatgaacaattaaaaacgcaccaatcggaataatccctagtagtgaatgaagacgtctaagataaaattcatttttagacttagccaaaaggagtcccccctgttataaaacttataaatttaattagcttctttttaagatagtactataaacgcatttactattttatttagtacttgtatgtataaacatataatagttataatgattgtaaattttctgaaaattaaacaaatcaaacatctctttttattagattgagtattattattttttataactacaagtatgtcttaaaaaagtaaatacaattaaaaataagacgaataaatgagatatacaagtattacacaataaccatgcaactactataaaatgataatatttctcatttagaaaacgcttccatactttcttaaaaaaataagctttttgttaactatattgtaacattctttctatatgtatggggtatgaaattcaaagtcatacccctttttttgaaattaatcttcttttaaagcatattgtagattttcagctacccttttaggtaatcctgcagcttttaaatcttctatactagcttctttcatttttttaatggaaccaaatgttcttaataattttgtttttcgtttacttcctataccctctactgtatcaagaacagattgtaatccagttttttgtcgggtttgacgatggaatgttatcgcaaaacgatgtacttcatcttggattctatggagcaaataaaaggcttgactatttttctttagaggtacaacctcagcatttgcaccgtacaataattcagatgtttggtgtttatcattttttcttaatccagcaacaggaatgtctaaacctagttcattttctagtacatctatgacaccagacatatgtcctttaccaccatcaacgataataagatctggtaatggaagaccttcattaagtacacgcgtataacgacggcgtacaacttctctcatcgacttataatcatcaggacctttcacagtcttaattttgtatttacgatatccttttttatccggtttaccatccacaaatgttaccattgccgaaacaggatcaacaccttggatatttgagttatcaaatgcttcaattcttatcggtgtttgaatacccattctttcaccaagttcttcgatagcttttatcgttctagattcgtctttagcgattaattgaaatttattttctagtgcaacttcagcattatgattagctaaatcaaccatttctttctttgttccacgcgcaggttgaacaatttttgtatcaactacagagtgaatgatatctttatctaaatttttcggtacatgtacttctttaggtaaaatatgttgatttaagctatagaattgtccaatgaatgtataaaattcttcttcttctgtttgttgtagaggaatcattgttgcatcacgttgaatcatatttccttgtctaataaagaatacttgaatacacatccaacctttagaaacgctatatccaaaaacatctctaattgtattatctgaagacataattttttgttttttagttaaattacgaatatgttgaattaaatctctatattctttagcacgttcaaaatctaacttctcactagcatctagcatgcgtgtttcaagattatgaagaattgttttatcttctccatttaaaaagtcagtaatttcacgcgtcatttgtgcatatttttgttgatctacatcatacacacatggtcccatacactgaccgatatgataatatagacacaatttatcaggcatattatcacattttctaaaaggataaatacgatctaataattttttagtttcctgtgctgaatatgcattaggataaggtccaaaatattttcctgtacccttttttactgtacgagtcacaagtaaacgtggatgtttttctttagtaatctttataaaaggataacttttatcatcttttaataaaatattgtagcgaggttgatattgtttaatcaaattcaactcaagtaataatgattctgtctcacttgaagttacaataaattcgaagttgcgaatttcactaacaagacgtgtagtttttgcatcatgtgcaccagtaaaataagaacgtagtcgatttcgtaatcgttttgctttacctacataaataatttggtcatttcgatctttcattaaataacagcctggttcaaatgggacgacacttaatttatctctaattttttcttcgtagtcggtcatccgtctcctcctttctattaacttgacgttcacataaaaaagacggagcgattacataacatgtaatgctccattcttttataattgtactaaatattatagatgtttatctaaaacttctgctaagttttctttaggttggaaacctactactttatctactgcttctccatctttaaatacgattaaagttgggatgctcattacttcatatttagcagcagtagatggattttcatctacatctaattttaagatgtctgctttaccatcatagtctccagctaattcttctaacacaggggcgatcattttacaaggtccacaccaagttgcccaaaaatctactaatttaacacctgattgaatgttttcatcaaaatttgaatctgtaacttttacgattgccataattgccaatcctccttaaatattaaatgatgagcaaattataacagactttccatatatctgcattgctcttgctcatctttatcactatttattaatcttgtcataaacttgtgttaagattaaacgcttgctttattgtacgtcaaattttaaaaaaatcaacattctagttttatattatttaagttctgctactgtaacaccaaatccgccttcacttggcattccaccacgaaaagattgaacacttttatgtttttttaaatgattttgaactgctttttgaagtgcacctgtacctttaccatgaataatataaacctgttcatagttacttaatacagcttggtcaatatattgatctaaagctccaaccgcttcttcataacgatagcctcttaagtctaattctgttttaatagtttgacgattttggcgtgtcaccattttagttggtttttcttttttctttttcgttttttctaaatcttcaataggtaatttcattttgataatacccatttgaactacagcttcattttctccgcttaattctaatacttcgcctttttgtccataagataatactttaacttcatcgccagcatgaatatcatcccatttttgtttttttacattttgttttaaggatttagcttcatattgatcttctaaatgttttttcttatcaattagttcatgttctttaacgtcggctccttttttatctcgcatttctcttaaatcttttagaatgtcatctgcttcttttgtagctgatttaattcgttgatttgctttatctttagcttcatccattaatttttgttcataatttttatattgttgatactgacgttccaaatcatcatgcgttgttcgtgcttctcttaataatttttcaagctcaatacgttgttcatccacacgcttagagtttttctctaatgattctatcattgaattaatttcttgttcgtctgtgccaatcattgttttagctttattaatgatgtttaatcctaaacctaattttttagaaatatcaaaggcattggaacgtccaggaacacccattaataatttgtaagtcgggcttaacgtattcacatcaaactcaacacttgcattcataacgccttcacgattataactataagctttaagctctggataatgcgtcgttgccataactagcgaaccaatatctcttacatgatcgagaatactcatagctaaggcagcaccttcactcggatcggttccagcacctaattcatcaaataaaacaagactatttttatctgtttcttttaaaatttctacaatatttttcatatgtgatgaaaacgtagatagcgattgttcaatcgattgttcatcacctatatcacagtatacattttcaaatacactcaattgactgccatctaatgtaggaatgagtaacccggattgagccatcacaatgataagtcccaacgtttttaaggtgacagttttaccacctgtgttaggtcccgtaataataaccgtttcaatatcatcaataaattcaattgtatttgctacgactgtatctttattcaataaaggatgataagcattaggtaaataaaccgttctttccttataaaaagtaggttttgtccctttaattgatcgtgcataacgcgctttagccgttaagaaatcaatttgacccataactgactctgccactaaacaattattatcatcagcagctactaaacctgttaattctgttaatatacgttcacgttctactgcttcatcatttcttaatcgactaatttgattattcatttcaacaatggaagagggctcaatataaagggtttgtccagaagctgattgatcatgcacaatccctttaaaatcttgtcgatattctgcttttactggtatcacattgcgatcatttcgcactgtaataatggcatctgaaagtttcttttgattagcttgacttttaacaatacgatctaaattttgtctaatacgttgagtcgtacttgatattttgcttcgaataccttgcaattcataacttgcattatcatataaatcataagcatcacatttttcatttatctcttgatataaatcagtaagtacaggtagttgattcattctttcatttaaaattggatactttacgacgccttcatcttcttcaagcagttgattataaaatgttttaaattgattttgtacttgtatcaaccgcttaattacatttaattcggtaacattaagcacaccaccaattttagcacggtgaattaatggtgatacttttgataaaccacttaaactaggtaaacgatgtttattataaatttgtgatatttcatctgtctcattcatttgaaattctacagtttcaaaatcagttgctggagacattttagacactttttcacgtcctaaatcacttatcgtttcagaagctacaaatgatttgattttatcaaactctaagacgtctaatgttttttgtctcatacaatccctctatttctgtaatttaatattattattaataaagtttttaaaagcgtcacgcgtcattgtattaatcactctatctttatttacaaatcctttttgcgcagtagctacgccatatttcataaaatcaagatgatccacatgatgggcatctgtattaattgttaatttaatatttggatattttttaacagtggcagcatttaaatctaatcgttttgggttagcattaatttccattaccgtttgtgtttcttcggcaagttgcatcaactgttccatattaggttgatacccttcacgtcgctcaataatacgaccagttggatgggcaatatgtctaacataagggttacgacatgcatgttctaggcgcttcataatttcttcttcagattgattgaaactttgatgaatagctgcaataacatagtcaagttgcgatagtatatcatcctcataatctaatgatccatcaggtaaaatatccatttctgtacctgagtaaatatctatttctgtgtattcttcattcaatttttttatttcttcattttgacgtaatagtcgttcaacttgtaatccatgagcaacttttaaactctttgaatgatccgtaatgaccatgtattcatagccttttttaatgtttgcttcaatcatctctcgtatagagaaagcgccgtcactatacgttgtatgcatatgaagatcacctttaatatcatctaatgtaatgattgagtttaaatcacaatcaaactcgctgccatcttcacgtattgccggagcaatccaatgtctaccgaagtgttggtaaatttcagcttcactttggaattggagtaacgttccatcttgttgttcgataccatactcacttactttttcattttgtgctttagcaagttgtctaatgcgaatgttatgatctttggaacctgtaaagtgctgtaaggtatgataaaaggcttctggttcaacaagtctaaaatctacaccaatcgtttcatcatcatattctaattcaagcgacactttcgtttctccaactgcgacttctttcactttatttggaatatttaaaagttgttgttgtacatgaagagggtgtcgtgtactaataatatagtctaaatctttacttacttctttataacgacggaaactacctgcttcagaataatgttcaacttcttctaattgttctagataagtcataatatctttatttaaatgtcgcatcaaatcaataggataatgatcttttttagctcctagtgcttttactgcttcaagtatgttttgttctgtttttttagcaaatccacttaattcactaacttttcccgcttcacaagcttcttgaagactttctttatctgtaatatttaactctttatataactttgcaatttttttactacctaaaccttgaattttcattaaagaaattaatccttcaggaactaaacgttgcaattcttttaaagttgatgaggtcccagtttctcgatattcgctaatgacctctcctaccccttttccaattccttttaattcagtaatatcttttatttcatctaaagagcgttcatctatttcaagactttgtgctgctttgcgataagcagacactttaaacgtattttctccattcaattccatatatatagcaattttttctagtagttgaattacatctttctttgtcattacattcactccataaaaagagaccaggaggtttatatccatcacctagtcctgaccttttatcttttttatttataaatttagtatataagatgataaaaacggcatcttaaatagaataatatggcttaaataaccgtattttaaactttcttgaatccattcattaggatataaagatactaaatataaaacaagttgcagtacaatcacacttgcaatactacctaatacgcttcccaatattcgacttgtaacatgaatattatgatatgacactatattatcaaaagttacaataataagatataaaagcaacttacttataaaagcaatacataaaaatgccacaatagtatcaaaacgttgttgtacatcatggtattgaaatgcgaagtgcgtgtcaaaagcaactgttttaggaaatggaacaaaaacaatcatttgttttgatatatattggtaaaaacgatgcgcaatgaatagtgagacaagtgtagacgacaaatgaagactattcagccaaaggcctcttctaaaaccaattatcatatacatcaaaataataagtatcattactaaatctatagtcatttagctatcctgatgttttaattcataaatcatttgttttaatatttcgttttcttcttccaatttcactttttcgtccatgatattcactgcagttaaaattgcttttcttgttgtatctaatcctgctgatttacgtcctaataatcttagctgttcatctactaaatgtgctacataacgtatgtgttcaggatcatcgtcaccgataatcgtaaaattttgatcattgatcgatacattaatacgatttttaaattctaccattgtattaactcctgacttttgataatattttaaatttctttgactaatgttttgttgagtgaataagtagattattattattatacatgagtgtctcttatttgtaattatagatttaaatactattgatttataccactaaacctacgttcttatcttcattatgttaaagtatatctattagaattttaaaagagaggtttaaacaagttatgggaaatgtagtacataaattaactaatcaagatattgagcaactgatgaaccaaattaactttagtacatccaatttacctaatgggatgaaagcaagaaccaaatatcatgacactgtcattagtatttacaattctggtaaagttatgtttcaaggaaaacgtgctgaacatatagcgcgtcaattttgtactactgattctggaactaattcaaaatcttcaaaggcagatggtttccataatataacatatgatgattataactgtattggtagtgatgaagcgggaagtggcgattattttggcccattaacggtttgtgctgcttatgtatctaaagagcatatagatattttaagaacgctaggcgtagatgattcgaaaaaattaacagacactaaaattatagaacttgcagaacaactgattacctttattcctcattcattacttacattaaacaatactaaatataatgaaagacaagcactaggttggtctcaagtaaaaatgaaagcagtccttcataatgaagcgataaaaaatgtaactaacaagatagatactaaagcattagactacattgtcattgaccaatttgcagaacgtaacgtctacaagcgttatgctctaagcgacttaccttttccaaatcaaacaaaatttgaaacaaagggagaatctaaatcccttgctattgcagcagcaagtatcatttctcgctatgcttttattaagcacatgaattcaatatcaaaaatgatgcattttgatattccgaaaggcgcgagtcataaagtagatttaattgctgctcaaattattgaaaaatataatattagtaagttagattctatttcaaaaaaacattttaaaaatcgtgataaagcatggacattggttaataaaaagtatcaataaagaacattttagaatgctataagatagcactacgacgatgtctgaattcatcaaattcagtatcgagaattgtttcaacactattatttacatatcgtgacacatcatttgtgggaacaagtgctgaagtttctatcgataaagtaagttgagtcatgctagaactttatacataaggtacctcgttaatttagtttagtgaagtttattaaattatacgaaaggaccttatttttaaaagtatttcaatgtaaaactgtatataaaaaggattttagcgaaactcttgtgggaatacgatacgttaaaaactacagactagatctgtcccctaataaagagagtcaactatacaaagtattgtaaataatgaaaccagtaaatgactttataataaactcatttactggctatttttttaggatatatgtcccaatctcttctttattttattatcgaattgtagcgcctttagcttttaatgcttctaaaattttatcatgcactttagaaacacgttcatctgtaagtgtattttcagtatctaaataatttaaacgaatggctactgattttttaccttcttccaagtgttcaccttcatacacatcaaatacaagtgtattttttagaatgtcttcaccattctcatgaataatatctaataattctgatgaaggcatgtcacggtttacttccatagcgatatctcttgacacaccagggaattttggaattggttcataattaatgtaacctacagctactcgcatcattgaatcataatctaattcaaatacatatgtgcgtttaagatcattttcagctgctaattgaggatgtaattctcctacaaatcctatctctttaccttctaatgaaacaatcgcagttctgcctggatgaaggcctttaatttcgccagctttataagtgaaatctaaatttaatttttcagcaattcgatcgactacacctttagcaataaagaaatcaatctcttcttttttaccttgccaagtattaactacatattctccagttagaataccacttaaatattctatttcatccggtaattcatctttgccgttaccaaagaacacacgtccaatttcatataatcttacatttttatttttacgtgctacgttataagctgttgcttcgattaaatgtggtaataagctttgacgtaatgtagaatgcgcttcactcattggcataagtagactaattgtaggacgttcttgtaatgcaaaatctttcgcatggtctttagacacaagtgaatatgtgatggcttgatttaatcctgcaccttcgagtgtttcttttactgtacgcgttttatattgacgatctgtcaattttccactagttacatcatcgaacactggtaaagttgaaggaatattatcataaccgtatattcttgctatttcttcaattaaatcctccttaattgaaatatctttacgacgtgaaggtacatatactgttaaagtatcggcattttgaatcgttttaaatcctaattgttcaaaaatagctttaatctcatcatttgataaattaaaaccaattgtttgatttactttttcggcagtaatatcaattggcgtaacaagtgaacctaaatccccttgtgccactctatcttttaatacttcgccagaggcataatgttcaagtaaataacaagctctatcgactgcttcattgacaaattctgttgcaatacctttttcaaagcgacttgaagactcactacgtaaattcaaacgacgtgatgtgtgacgaatagatacagggtcaaaaatcgcaccttctactacgacattcattgtttgatcagtcacttctgaaaaatctccacccataacaccagctaatgcaataggttctttaccatttgtaataacgatatctgtatcaataagagttctttcagtatcgtctaatgttgtcattgtttcattttcattcgcttgacgtacaacaatatctttagaacccatatgatcttgatcaaacatatgaagtggttgaccatattcgagtaatacatagttagaaatatcaactacattattaattggacggataccagctttaattaaacgtgcttgcatccaaataggtgatggtgcaattctcacatttttaacaactcttgcactgtaataagggactttttcaggattatcaactgtcactgataactcatctgttgcggaagtttcagtttcgttaagcgttgtgtttggtttagtcatttcagcttgatataacgctgcaacttcatatgcagttcccaccatacttaaagcgtctgcacggttaggtgttaaatcaaattccataatttgatcattaagatataatgcgtctagtgcatcagttcctggtgtcacttcattaggaaatacgaaaattccattttcataatcttttggtacaacattacttgagacaccaatttcttgtaaggaacaaatcataccttccgaacgttctccgcgtaatttggcacgttttattttaaaccctccaggtaaacgtccacctactttagctacaatcacatattgattttcatcaacattaggtgctccacaaacaatttgaacaagttcttcttcacctatatcaacttgacagatattcaatttatctgcatctggatgtttttctttagatgttacatatcctactactaaatttttaatatcttttgagtaatctataatatctgctacttcaatacctgtacgtgtaatacgctcagctaagtctttagcaggtacaccagcatctacgtaatcttttaaccattcatttgaaatcaacattatgcttcacctctatcttctacagctttaaattgattaaggaatctcacatcatttgtatagaaatgacgaatgtcttcgattccgtattttaacattgctatacgatctggccccataccaaatgcaaagccagaatattcatttgaatcaaaaccggccatttctagaacattaggatgtaccatacctgcacctaagatttcaatccatccagtatgtttacatacattacatccttgacctttacatttgaaacaagagacatctacttccactgatggctctgtgaatgggaaataacttggtcgtaatcgaatctcacgatcagccccaaataattttttagctactaactctaacgttcctttcaaatcactcattttaatatgtttatctactactaaaccttcaatttgtgtaaattgatgactatgtgtagcatcatctgaatctcgtcgatacactttcccaggacaaataatttttactggtccttgaccgtgacgtttttccattgtacgtgcttgcactggagacgtgtgcgtacgcatcaaaatctcatctgtaatataaaaactatcttgcatatctcgggctggatgtgatttaggaagatttaaagcttcaaaattataataatcttgttctacttcgtatccgtcaacaatttcatatcctaatcctaggaataaatcttcaatttcttcaactgttctagttaatggatgttttgagccaatattaatttgacgactaggtaatgtaacatcaattgtttcctcagcaagttgttggtttaacttttcattttttaataattcttgtttttcttcaagttcattttgaattgcttgtcttaattcatttactttttgtccataagctggcttttcttcatttggtaaatctttcatatttttcattaaaccacttacagagcctttttttcctagatactttactttgacatcttgtaaagcacgttcatcttgcgcttcgttaatgtctactaaagcttgttgtcttaattctgtcattgaatcattttgagtcatgacttacacctcatactttctatttatcataaaatttgctttattaaattaaaaaaagactttcatccctaaataactgggacgaaagccttccgtggtaccacccaaatttatgcttaagcatacacttgttagcattgttaacgaagatgcactccgacttaaatttctttaagtaaccaaaaaggtgaaaaaaactaatgtaaattgaagtaagtttcagtcacgcttactttccctgtgcaattaatcatttagtttacgtctttttatcggtttatatttatctttaataaacatatcattttaattttgtatacaattaagtatagtcgattttaaatcaaaaggtcaacctttcaaatgataaagcaaaatacttccagcaatcgccacgtttaaactttccgctttgccgtatataggtataataagattttgcgaggtatgtgctaataattctttattaacaccttctccttcattaccaagtaataaggcaaatgtgtcttgcgattcgatgtttttataagacacagcattttctaaggctgtaccatatactgggccatcaaattgttcaataaatttatttaattctgttgtgacaataggaatgtgaaatacacttccttgacttgctctcattactttgtcttggtatgcgtctgctgtacctttttccattacaaccatatctatacccgcagcatctgctgtacgaattaacgtgcctaagttaccaggatcttgtatacgatcaagtaataacacttgtttcgcttttgagatatcatgtttaggtttttcaataactgcaaaaaaaccttgtggtgtaatagtccctgataatgattcagccactttcatattaatttcgtaagcttcttttgcatactctaaaagtctagaatctgttctttctggctcaattacaaataattgtttaatcattatattacttttaaatgcttcatcaattaaatgtatcccttcgatgagagctaatcctgttttatcgcgttcttttttctttttaagtttatttgctaatttaattttattattttgtgttgaagtaatttgttccataatagtctctccaaattatttttgatagcaatggtataaattgagataatataaaaaaagagtgggatagaattcataatgaattcgtattccaccttttttaaatagatataaattatttagaaacgacttcttcaccattgtaagaaccacagtttttacatacgcggtgagataatttgtactcgccacagtttgggcattcagtcataccaggtactgaaattttaaaatgagtacgacgtttattttttctagttttagacgttcttctttttggtactgccatgatatatcctccttaatattaaaacacataatctcaagtattcggtcatttaattattatactataaattaaattaacctgctattactctttatcatataactgttgtaatttttgaagcctaggatcaacttggcgtgtttgggaatcgtcgttatctttagagttttcaagctcaagcgcttgttcttcatcaataacttcccaaccgttaccttctgtaagcatttgatcactattctcagaaaatgcacgcattggcttctcaataataaccaattctttagcaatatctcggatattaatcataccatctgtagcaagatgataatgttcatcttcatctacttcttcttcggtataactattataaccttctaaatcaaatacttcggaagttctgacatcaagtggcacatctacaggcactaatgtacgagcacaaggcatagtatacgtaccagtaacatgcatatctgctatcacttcatttgattttatggttaattcaccttcgatatttacttctgataaatcaatcagacctaaaggttctattaaatcgtcaaagttcgccttttcattgaattcaaaaggtttaccttgatattttctcaattgcgttattgaccatttcatatggcttcacctctaacaaacacaaaatttattttaactttactattataagttgtcaagattttttcttaacatcttattatctgttacaatactaataatgaatactgaaaggacgaattgcaaatgaaaagtgttggattgattacagagtataatccatttcataacggtcatgcttatcatacgcaacaagctaaaacacagtccgatgcagagatctctattgcaatcatgagtggtaacttcgttatgagaggtgaacctgctatttataacaaatttctacgtacacaaatggcactttccaatgtcgatttagttgttgagttacctcttatcgctagtctttcttcaagtgattattttgcacagatagctgttcaagttgctctttatctagatgttgatactattgcttttggaagtgaaacacctgatataactcgccttaaaaacgctgcaaatgaaataatcaatttagaacatagttcaacttttaatcaaaaagtaaaagaaggtagtaattatgcaaaaattataaatgatttaattagcgataatactttactaaaaatgcctaataatattttagcaatcacttacttaaaagctatacaacaatttgcacctcacatgaaagtacttgctatccaacgtgtgcatgcttatcatcatgatgcgacaattgaaacatcatcctttgcaagtggttctgcaattaggcagtcgttaatcactcaagcaactcagtggactacagttgttccctcttcaattcaatcactgtatacaacacctcatttaactaaagaggatacatttaacttgattaaatatcatatcttaagtcattcaattcatgaaatggctcatatatacactatatctgaaggactagaacatcgattaaaaaaatatattaatcaagcaacttcttttgaatcctttatgtctttactgaagacaaaacgctttacctatactcatttacaacgcatacttatgcaaattcttttaaatgtaaaaaaagaagattctattcaatccatttcagctgtaagaattttaggaatgaatcgtcgcggacaaggttatctcaaacaattaaaaaccaaatttccagagcgtcaattcatcactaatattaataaaacatctgctcatttttttaaaaatgaaattaaagctaccgatatttataacttattatcaggtcaaaagaaaaatgattttaatacacctgtaattagattaaataattgaattaaagcgtatggaacatttcatttctgttctatacgctcattttttaatcttcaaatttttcttttaatgctctttcaacatgactaggtacaaaatctgaaatatctgccttatattgagccacttctttcacaacacttgaactaataaatgaatagtttgtacttgtcatcatatacattgtttcaacattactatttaattttttattcattgaagttaagcgtaattcatattcaaaatcactcactgctcttaagccacgaataattgttttagcgcctattttatcacaaaaatcgacaagtaatccattaaaattatgtactttcacatttggcaaatgttttacagattcacgtattaattccatacgttcttcaatagaaaatgtacctgctttactactattttttaatatacatacatgaagttcatcaaatcgatcagaacttctttcgataatatctaaatgtccataagtaataggatcaaagctacctggaatgactgcttttgtcttagtcattgtgttctcctttttttaataacaaagtatctgttaaaccgtaatgatattgcttaattacttcaaaatcatatgtattgattttttcttgattactaaactcacaaatgataataccatgttcttttaataaattaaacttagaaatttggtctagagccttatctattagccctttattataaggagggtctaaaaaaataaaatcaaattgaatgtctcttttattgatagcctttaacgctctatctgcattatttttatatacttcagattgttcctctaaatttaattgtttcaagttagcttggatcactttaactgctttaaagttttggtctacaaatataactttattcatacctctagaaagtgcttcaattcctaaagcaccactaccagcaaataagtctaaacctaagccgtatacttcatgtaaactgttaaaaataccttctttaactttatccattgttggacgtgtattgcgtccttctaaactctctagtggtttacttttatgttttccagcaatgactctcattttgacttacacttccatttcattcatttatttactataatttgttttgaaaaaggagaattaaatatttatgaaacaatcatttattattttaggagaaggacttacagatttattcgaatttcttactcttattgaatataatcatgcaagaatagacaaggttgtctatttccatacaccacagtcagacaaacaattatcgtcagtcgcaattattatgaatcctacgaccggtaaacaatttcaagccatgtatatgatgttaaacgctttaaaatatccctacccaagtagtaataaaaaatttgagatgattaatgaacaagctcaatcgtatgatattcctattgtcggcattgatgttcaaccgccaaatgcatttcatacgaatgatttatattttaaatatttaattagcgtacttcgtttacaaaattggatcccaccgatgcaataacaatttttaaatacatcttaaagcatttcatgcttttctttatcatatgtttttttcaagtttttatagggggatccatcaatatgtaagacatattttaatttcattaatttctggagaatatcgtctacttcatgttcattaacatacattactacatactttcgaggtttattagtataaacaatatgtccatatttacgtatctgtctttcatgtttaatatgctttaagtaaataattaagctaactcttggaatcaattccatattatttcactcactccatttattatgcataattactataccatgactaataattttataaaatacattcattatctcaatacttaactttcaaaaaatattgatttaattattaattttaaatgaactttaggaggttataccttgaaacacattaagaagaatttttttaatttgggtatcactagtatgggtatactaagcagtttattacttttaaaaagaaatcaaaagcctaacatgcttaaagacataccttacttttttaatggaccagcaccttatatttttgcacatagaggtggaatgtcagttcgaccagaacaaacacaattagctttcgataatgctgttgattatggtttagatggctttgaaacagatgtgagactaactaaagatgaagaattgattgtttttcacgacgctacagtcgaccgtactactaatggttcaggaaaagtatgtgattacacactaaaagaattaaaaaaattagatgcaggatttcattttactgatatcaatggtcgacatatttacagagggcatcaacaagctagaattttaactttcgatgaacttttagaaatgtaccctagcaaatatatcaatgtagatttaaaagatgctccaagtagttatgaaggatctattgcgcctaaaaaaatgtatgatattataaagcatcatcatgctgagaaacgtgtacttgtaacgagttttcataaagaacaaaatgaacattttagagcaataagcaatggagaaatcgctactggcgcaagtcaacatgaagtgactgaaggtgtgattaagtttattttaggactaggctatcattatcatcctcaagctgacacatttcaaatgcctataaaattcaaaggtatcccattatcatcaactcattttattcaatggcttaacttattaaatattgtgccaggttattatggcatcaatagtgttgacttaatgtatgatttgtatcaaaaaggtgttcacaccattgttactgaccgtcctgatttaggtaaacaatttaaatcactactaaaacagcataccttaagttaaatacacttattctatatattatataaaattaaactatatgcataaaagaatctgagacatacatcatcattgtctcagattcttttaatatattaatcatcaataactaaaataaaaatatacttacatctaattttgcaactcaacctctgatttactagatttttattcttaattataaactacaattacatgtgcctcctgaggcgcaacctttagaatctgttttaaaaaatggattacccacttcaatctttacattttctgacacagataatgcgattttagtcaacacttcatctattaaattttgtaattgtacttctttagatttgtaatccattacattaggcaacatttcataagctcgcttacgtcgacgtgtatctaacatgacattttgataatctgggtgatatctaccaaagcgcatcacttcatcataacgttcttttgattttaaaaaagcttgatacaataaatgtgcttcatcatcttgtttaagttttttttgagcttctctataattaaaatacacttttgattgtacaatcatgtctgataaatcttcaatttcatctaaaattgataatgtttcctctgtatacattatcggtcacctcacaacctatttttgtacaaaaataagtgaataataatttctcattacttctccacccatttcattatactttttatttaacattcttgaacggtgtatatccgaattcatccaactatgaattaatgtaggcacatcattgaaatcataacccacattttgacttgtagctataaaatcaatattttcgttatcaagttggctcttaagtgcaccttctgtaaattcaacatcttctgtaccagttgcttcatataagtttgctgaagcaatgtgtgatatgtctgaatttactttcaatggtggaatatgttttaaatctctcatttgattagtaatttcatagagtgttatcaattgatttgggttttgttcatatggtaatgaatttttattatttctgtcattattaaatttatcatctgatatatcttcttcatctgttaattgatacggttttataaatgctaatagttctttatctagatatcgaatacccataattcgatttgattgttgatctacataaacttgagcataaacattaccatatttaattagagtttgagttttaatatcttcatctgataactcaaaattatattgttttccattcactttaaaagaggggtcaggattaatactagttttttcaaatatatgtgaagcattttcattgatttttaatgattcggtttgagctttttctccagtagcataaacagatttaatttcgtcatgttttgtagtgacaatataatattgttgctttctcttaaatatataatcagtatatccgcctttaacagggtatgtacgatttgcttgtccatatttatttgtaagataattaatatctttacctatccaagtacctatcccatttttgggagcaggattttcagtctgttttttcacggaatgtgattcttgatttgaatgacttattttattgttgttattaggattttcaaggacatcaaattttaatcttggtgagtaaaataaataaattagaaatgtaattaaaaatacgattcctaaaactttaattactaacttagtcattactcccccacctctttagaattacatatattgtacaaaataactattttaacaatcaagtcattcattttttctaaactccaaatttattaattaaactacattatacctatttacaaataaaataaacaattaatattaagacatagcttatactaaacaattttatcatatcaatatagaatccactgttgttatttcatgataaaaaaggaagtgaatcagaattcattttgaattcgtcgtcctccttaacaatttgatcatcgactacccaaatattaaaaatacctgagacaactcattatgtcccaggctattctttaaaattattcaatattgttataaacctagtgtggctttaatcaacgatgtagtttctccacctggataaattacatataataataagtatactgccacacctgtaatgccagtaaagaaccatataattgaagcgacaggtccgattcttctatgccatttaaatttatctttaaatgcagtaataatttgaactaatcctaatacgccaccaatcgtagcaagattaacatggaagattaagaatatcttataatatgttctaacagaatctggaccaccaaaatctgtattacctataaatatcgttcgagttgagtaaataataaaaaacgttaatgcgaaaaatgctgcccataacataacttttttgtgagtattaacatgacgatgagcaatttgccaccatcctatcgctactaaaatagcactaattacgatacagcttgtactaatagttggtagaattggtaaactcatatgttccatccttatttaacttagatattttaaatcatttttattaaagagatgacaacgactaatgcaaagaatactactagataatttagtgaatagataaacatttttgttgcccacttagtttgatcggtatttttcttaaatgttgttaaacctataaaaatccatccaaaatttaataaagttgctaatacaacaaacgtagtgcctaaactagataataggaaaggtaatggtaataataatactaaccaaataaacatacttattcttgtacgtttaaaaccttttactgaaggtaacataggaatatttgctaatgagtattcatcactacgtttaatagctagagcatagaaatgaataggttgccaacaaaagacaactaaaaataaagcaaaagctacaagactgatttgtccatcaatagctgtccatccaattaaaggtggtacagcgcctggaaaacttcctactactgtattccaagtcgtatgtcttttagaccagattgaataatatgatacatatcctactataccaaaaagtcctaaaacacctgatggcacatttaataagaatagacatgcttctcctactaacatcataccaaaacttaacatcaataaatgtttatcagaaattctatcgtttactgttggtctactttgtttacttggcataattttatcaatatcttgatcataataattatttaatgcacaagcaccacccataattaatgtcgaacctatcaacattaataggatttgaggtattgacgataggaaggaatgatttgtcattacaatagctaaccaagcgcctgcaaaagcaggaattaagttaccctgtaccaagcccattttaataatttgttgtagttctttaaaagacactctacttgacggctgtgataaagtgtgttctttactcatggttcccctccttaaaattttcatatagtattatgatataataattacttataaaaggctaggttatatttatttaaattgtgacactttaacgactttctgtttcactaattttttgtctttaattattgtagtataatagtggtaatatttataattatatcttttatattaaaatcagagcataaatggatatcatattacaaaatattttaaattaatggcggggtgtttaaacttgtttaacaaacgaaaccttaaatggttatcaatcgtagcaacaattattatggcaatggtacaacttgggggcgccttagtaactaagacgggctctgaagatggctgtggtgcttcatggcctttatgtcacggtgctttattacctcagaatttgccaattgctacaatcattgaattgagtcaccgagctgtatcaggtttatcattaattgttgtgttatggttggccatcacagcttggaaaaatataggatacattaaagaggttaaacctttagcaattattagtgttgcttttctattaattcaagccttgattggtgcagcagctgttatttggcaacaaaattcttatgtcttagctttacattttgggatttcattaattagtttttcttctgtattcgtattaatgcttattatttttgaagtggataaaaaatatgaggctgatgaattatttataaaaaaaccattgcgtaatcttacttggattatgacgggcgttgtttatgtcgctatttatactggtgctttggttcgccatgctaaagcaagtttagcatatggaagctggccattaccgtttaatgatttagtaccccatactgagcaagattgggtacaatttgcacatcgcggtatggcacttatcactttttgttggattatgatcacatttattcatgccatcaaaaattattctgagaaccgtacaattagatatggttatactgccgcatttattttaattattttacaagtgattacgggcgcattgtctgtaatgacacatgttaatttaattgttgcattgctacacgcactttgtattactatactttttggcttaatcgcttactttattttactcatgcttcgttcaattagaagtgaaaattcaaaaattaaataaagttttaaaagacacgttagagttattgtagaacatataatctctaacgtgttttttatgcaaaaaagcataagatagaatgtcatttaactttctatcttatgcttttaaactttttaatacctactcagatttttcaatttcgattaataaatctcccgttgcaatagcatcaccatttccaacagtaacttttttaatcactccattaaacggagcttgaattgttgtttccattttcattgcttcggtaattaatagtggttgatttactttaacctcatcacctactgaaactttaacttcagtcacacttcctggcatttgagctcctatatgatttggatttgttttatctgctttaggttttacattcgcatttgtttttatgttttcatctttaatcgtaatacgacgtgcttgaccattcatcacgtaataaattgttcggttaccattttcatctgcttcgctaattgtttcaagtttaataattaaacgttttccgttttcaatttcaatctctacagtctccccgttacgcataccaaagaagaatgtcggtgtatcaagtaatgataagttaccatattgttgtctagtttgaataaattgatcaaatacttttggataaagtacataacttataatatcttgctcagtcacttcaccataatttttatcttgtaattgttctcgtatctcatcaaaatctactggttttaaatattctcctggacgttcagttagcggttgttgaccttttaaaataatatcttgtaattgtttattaaagccatttactggttgaccaatctcacctttaaagtatgacactactgattcaggaaaatctaatttataaccttgttcaataatcgattgttcatctaaatcattttgtaccatatataacgccatatctcctaccacttttgaagatggtgtcactttaacgatatctccaaacaagaaattaacacgacgatacatatctttgacctcattaaaacgttcaccaagacctaaacttttagcttgttgacttaaattagagtattgaccacctggcatttcatgttgataaatttctgtattaggtgacttaatatcactttcaaagtcaacgtagtatggacgaacagtactccaatagtgacttaattcttctaaaccttgaatatctgtacgcatatttcgtttaaatccatctaatgcataatataaagagttcacacttggttgacttgttaagccactcatcgatgcaatagctgtatcgataatatctacaccagcatcgatggcttgtttgtagattaataaaccatttccacttgtatcatgtgtatgtagatgtattggtaaattaactgcagcttttaattctccaaccagttcatatgctgctctaggttttaataagccagccatatctttaattgctaaaatatggaaaccttcacgttctaattctttagctaatttaacatagtaatctaaagtgaacacatttgaacgttctgggtttaaaatatcacctgtgtaacaaatagtaccctccgaaattttacctgctttttgtaccgcttcatttgccactttcatttgatctacccagtttaatgagtcgaaaatacggaaaacatctacacctgctttagcactttcatctacaaatttttgaattacgttatcaggataattcttataacccacagcatttgaagctcttaataacatttggaataatacatttggaatcgcttttctaagtttttctaaacgctcccaaggattttcttttaagaagttgtatgctacatcaaaagtagcgccaccccacatttctaaagaaaaactatctttaaatacttcagcagttttagaagctatatttaacatatcttttgtacgtacacgcgtagcaagtaaagattggtgcgcatcacggaatgtcgtatcagtaattaaaacatcatcttgtgctttaacccaatccgcaactccactaggccctttttcatctagtaattgttttgtaccatatagactttgaattttcttttttgaaacttgcggaatcgaagttgactcatagtctggcttcgtacgtttttcgacattcggaaaaccattaatggttacattcccaatgtattctaatgttttagtaccacggtctaatgtaggtgcaatatcgaataattccggtgtttcttcaataaattttgttgtataatctccacttcggaatttttcattacgcatgacattaactaaaaatgggatatttgttttcacaccacgaatacgcatttctcgtaaagagcgttccattttttcttcagcttgtttaaaagtaatggcatgagtagataatttcactaatagtgagtcatagtaaggtgaaatttcagcgccttggaagccatctcctgcgtctaaacgtacaccaaaaccaccacttgaacgataagcaataatcgtaccagaatctggcataaaatcatttgtaggatcttcagtagtgatacgacattgaatagcataaccaagtgtttggatttcttcttgaggaggtaaagcgatacgttcgtcaaataggcttgctccatctgccactaaaatttgagttttaactatatcaattcctgtaatcatttctgtaatcgtatgctctacctgaacacgcggattgacttcaatgaaaaagaattcatccccagatactaaaaattccactgttccagcattaacatatttgatatttttcattaattgtaatgcagattgacaaatacgttctcttaattcatcaggtaaacctacagatggtgctacctcaactactttttgatgacgacgttgtacagaacaatcacgctcatatagatgaacaatattaccatattcatcgccaataacttgaacttcaatatgttttggattatcgatgtatctttcgatatatacttcactattaccaaatgatttttgtgcttcagatttcgcacgatgaaacgcatcttctaattcactttcttcgcgaacaatacgcatacctttcccaccaccaccacttgtggctttaatcatcagagggaaccctgcttctttagcaaatgcctttgctgcatcaaaattttcaattggtccatctgttcctggtataactggtaaatttgctttaattgcagttgttcttgcttttactttatcaccaaacatatctaaatggtctaggtacgggccaataaatgttatgccttcttcattacaacgtcttgcaaattcttcattttcacttaaaaagccataacctggatgtattgcatctacattcgcacgttttgctacttcaataatgcgttcaatatttaaataactttcggcaggtcctaaatcttttcccactaaatatgattcatcggctttatatctatgtaatgaatttttgtcttcatttgaataaattgctactgtttgaatatttaattccgttgctgctctaaaaattctaattgcaatttcaccacgattggctactaataatttttttatatgattcaaagaagaaacacccctttataatttgaatattctaactaattagataataaaattttatcttaaaataaatgagaaagctattacttttttacatacaatttataaaatgaaaatatagtaaataggttagcttaatcactattttaaaatgtaatcattaatatttattatacttaataactttatattatcatttataatttgaagacgctactctagactagtaatcctttaacttgtcacataaatgtaaaaagagtggaagcaaattttttaatactcgcttccactctcaataatgttagttacatatttacacctataattaagtgattttaatattgtctaggaatatccactttggattttttattttttatcgttcttttttcttcaactttaatttgtcttgctactaacaataataatcccatagcaatacttaaactgatcatagacgaaccaccaaaacttataaatggaagaggcacccctgtaagaggaatcgtggctgatataccccctaaatttacgaacgtttgactaccaatataactcgctacaccaacacatattaatttataaaaatatgaagatgttttagtggctaatacaaatgcacggaatacaataaaaaataataatccaattactaataaggcaccgaccagtcccaattcttcacaaattactgcgaaaataaaatctgtatgcgcttctggaagatagcccagtttcatgataccgttacctaatcctcgaccaaataatcctccatttccgattgccattaatgaattggataaatgatacccagttcctgaagaagaactaaaaggatcgtaaattgtactaaaacgtgcctttaaatattctggcatcattccggtgaaaataaagaacccagcaataagaataaatccaagaataatatataatataggtccttttactattttcttaacacctatacctacaaataaaaacattgataatataataattaatgttaataatgtttgtccaatatctccttgtaaaagtactaaacctaaacaaaggataattaaaataactggtcctttgataatttttaaattacctcttaactgtggtaattttttacttaatacataagaaatataaagaattaaagcaatttttagtaactctgaagcttgtagattcataaatcctaagtctatccaactttttgaaccattgatatttttacctaccaataatgttaaaattaaaaggacacagatgataatcataatccactgttgaatttttgattgtttaaaaacttttatattcatcataaatgaaataaaaaagacaataataaaactcatgataacataaattaattgtctgttataaaaatatgtacctgaaacctcaacgccacctgttaatgtccctttagtagctgccaccatactggcactgtaaaccatcactaaacctataaaacacaaaataacatatgaaattaataatggataatcgataaacttagaggttctacctatgtatcgaaatatattttttaaattattcataaaaaagatcatccaattctaaaaatttaaactatatatgctcattaaaacgatttatcaaattaaattctgtctaaactattatatactttgtaattattaattaacaaacataaatataaaaaataaaataaaaggactgaaaatattatttacataacatttcagtcactatcataaatttattacatatattaattcttgctcattataacactttcatattaaaagcattagacttagagttatacgtttgtgaatgcttcatgcaatttagataattctttttctaaacgaagcattaaacttttaccttcttctttatcaactaaaccaagtttcacagcaaagtctacttctttttgtaaaccaaacatttgtgtgtcgagaacctcttcatatagtgggcaagatggcatagttaaattatccatttgaaccttaattaaatgcaagattcggtcagcatcttgatttaattgctcataagcttcactatttatgttcatttgcttcggcatcacattctccccctatcattaaatatcttcatatcagaagtttatcctactaccttttaaaaagcaagtttattcaataaacccttcaatctaactatgataaaataatagttagattgaaactagggagtgggcaagatgattcaaattaaaggagatgtcaaatttcctattactttagatagtacaacatggatttttgatgatagaaaagtaaaaatagaggatattgaaaacggtatttttgaaggaactaaacctattaaatttgaagataaccgcgaatggaatagagcgatattagaaggacaaaccaatcctcctactttaaactctgaaattaagtatcgtaaacgtgctgtattagaagattcatttgcaataaatatgacaccattttttaaaaatgcagagcctttagaaagtgcaactacaattaaactttcaaatgatacatcttcaattgaaatcccattagaattattaccttatctttttttccaatttgctaaagatggtaagagattgtacgatgataattcagtagatagctttgtttataaccccgaggagaacgcctattcatataactttaaatatgtaactcgtattgaggtgatttaagttgcgagaagtacaatgtattatttgtgatactaaggtcttaattgatgaacgtacagttgaagctaaacgtctacgtaataatccaattaaaacattcatgtgtagtgactgtaaaagtcgattagacacacctagacaacgaccaaatgaaaatcgtaaatttaatctccattttccaaatgaaaacttatagtatacttttcaataataaaaagacgcaacatcaaatttgatgttgcgtctttttattagttttattgatcttgcatcatttgttttacacgtttcgcttctttttcacgtgcagctttatttaatattttttttcttaaacggatgctttgaggcgttacttcaaccaattcatcatcattaatatattctaatgcttcttctaacgttaaaattcttggacgattcattgtttgagtttgatcttttgttgctgaacgtacgttagtttgatgtttagctttagtaatattaactgttaagtcattttcacgattatgttctcctacaatcatgccttcataaacttcagtacctggttccatgaagtttacacctctgtcctctagaccaatgatggcataagctgttgcttgtccttgatccattgaaattaatgcaccattacgacgaccaccaatttgtgctttaacacgaggtctaaattcttcaaatgtatgattaataatgccataaccacgtgtcatagacataaattcagttgtgtatccaatcataccacgtgcaggtaccataaagattaaacgtgttaatccattatcagttgttaacatgtctaacatttcacctttacgcgcaccaagtgattcaatcactgctccagcattttcagatggaacttcacattgaacacgttcaaatggttcacttaatacaccatcaatttcgcgtaaaataacttgaggtttagaaacttgaagttcaaatccttcacgtctcatattctcaattaaaatagataagtgcaactctccacggccagctacaacccacgtatctggagaatctgttggtgtaacttttaaagatacatctgtttcaagctgttgatctaaacgttcttggatttgacgagcagttacaaaatcaccttcacgaccagcaaatggtgaattatttactttaaatgtcatttcaagtgtaggttcatcaatacgcaatactggtaacgcttcttgatgatcatgtggtgtaactgtttcacctacgttgatatcttccattcctgatacagcaattaaatctcccgcttgtgcttcttcaatttcttcacgttttaaaccaaagaaaccaaagatttttgttacacggaagtttttcactgtaccatctaatttaataagcgatacgttatctccaacacgcattttacctctaaatacacggccaataccaatacgaccaacgtaatcattatagtctaataatgctacttggaattgtagtggttcatcactgttatcaattggagcaggcacgtaatcaagaattgtttcatataaagactgcatgttttcatcttgtttttcagaatcaacactcgctgttccatttacagctgatgcataaacaactgggaaatcaagttgttcatcatttgcttcaagttcaataaataaatctaatacttcatctactactgcttctggtctagcagacggtttatcaattttattaactactacaacaggttttaaattttgttctaatgctttttttagtacgaaacgtgtttgtggcatagtaccttcataggcatctacaacaagtacaacaccatctaccattttcataatacgttcaacttcaccaccaaagtcagcatgtcctggtgtatctaagatgttaattcttgtacctttataatttatcgcagtatttttagcaagaattgtaataccacgttctctttctaagtcattagagtccattgctctttcatcaacatgctcattttctctgaagattccagattgtttaagtaattcgtcaactagtgttgttttaccatggtcgacgtgagcaataattgcaatattacgaacatcttctcttctattagtcattttataatatcctttcttaagtaaattcccacttttaattgcaacttttttattatatcataatattaacaaaagataactaaaaggtggggatggggatggaaaaaccaaaatctaaaggtatattctggatactttctattgtagcagttatatttttagtgctctttagttttagcgtgggtgccggaagtattccaatgatgattttaacatttatacttttcattgcaacgtttggcgccggatttacgcttaagaaaaagtatcgtgaaaacaattggctataatcaaccattaagatatataaagcttgagatatttttgtctcaagctttttttattgaaatcagattttttattttttaaagcgttgatgtaattctattaaagtagtcgtattaggcgctagataattttctaatatttctttatgaatatttgaatttcctactagtactgaattcgcacttgaaatatttaatggttcacctaataagttgctagctacgcctccaacttcatttaatacaataagaccaccagcaaagtcccaaggctgtaatctaggtgtgatataagcagccaattgtcctttagctacacttataatttctaaagctgcactaccatatgctctacaacttcttgcatcatttactatatcttgaaatatagggcccattttaggtttggttacccaatttggattgataccaattaagcttttctttagggtggtagattcaatcgtagataatgaatgtttattttcaaatgcaccctcacctaccttggcatgatataaaacatctttcattacatcatatacaaagccagcgtatggtttaccatttcggtagataccaattgagatagcaaaattttctttttgatgtacaaagtttaatgtgccatcaattggatccactacccatacgacaccttcaacatgagttaaatcatgaccatgtccttcttctccaataacacgatgttctggataactatgggttattgcatcatatatataattttcagtagctttatcaacattggtaactaagtcattcggatttgattttgtttcaatatttaattcttccttcatcattattctaactttatttcctgcttctaaaactaaacctttagcaaaatcatatagcgacatactatcatctcctgttgcttactattatacatcaaatcaattttataattgttatacatcattttataccttcatcactatatatgaaactcttatgaagagtttataagcataaaaataggtcgccaataaaggaaacctatcaaatccatgatataaaagactgaaaacatttaacatatacgaataaacatgtacattcatcttatgattatggaatacaaataagtaaaaggtcattatgctaattttaaatgtaaaatcggataatctctgctttggttgtctttttgagatccactctatgctttaaaaccatttttaatataaaatttcaatacatgttggttatctttattaacatctacatattggattttatcttcttgaatcagtgactgaagtataattgtaccgtaacttttattaaaatcttcaggatctataaacaacatttccaaatttttagtattgtattatagtcttttttcttttacttttattaatctcatgacactctcctaaccacgaggggtaaaatcctaaaaattaaatgactaacatctaggtactgactctacctttttagtttaaattaactatctatattgtatattactattctatcattatgactttgaaatatatgctacaataaactcaacatactattaaaataggaggaagatcaatgacacaatacacatttacacctaaagattttaaagcatttgacgttgagggtttagatgaacgaatggaagctttaaataaatatattagacctcaattacatcagttaggcgattattttagtgagtatttcacttctcaaactggagaaacattttatgcacatgttgctaaacatgcgcgtagaagtgttaatcctcctatagatacctgggtcgcttttgcacctaataaacgtggttataaaatgttaccccacttccaaattggcctttttagggatcaattatttatcatgtatggaataatgcatgaaggaaaaaataaagaagaacgtgttaaagtttttgacaaacattttaatgcattaaaacaacttccaaatgattatcaaattagtttaaatcacatgaaaaaagataaacaatatatcaaagatttaagtgatactgatttacatcaagctattgatcgtgttaaaaatgtgaaaaaaggagaattttttatagcacgtactttagctcctagtgatgaacaattaaaatcagatgaaacatttttagcttttattaaagaaacatttgatgaattcttaaaattatatgaataaatactattcttcggcctgggactttactagaaatctcaggtgttttttattttattggtaatcactcactgtcttgaagatccatctaaattcagtaatattcttttttacaacatttttaggttgacctaaaaatatatttaggttaatataattaaaaagattttaggaggttatgaatgaatcatatgagtaataaaaaacaacgcagcttagacgaaattaataatacagtagactttagtagtaataaaagtgcaagccaaaaatttttagcttttttaggtccaggattattagtagcggtgggatatatggatccaggtaactggattacatctatgcaaggtggagcacaatttggctatattcttctttttattattttagtttctagtttagctgcaatgcttttgcaaagcatgacagttagattaggtattgctacagagatggatttagcacaaatgacacgtcattatttaaatcgcccgttagcaattatattttggataatagcagaactagctattatcgctacagatattgctgaaattatcggaagtgcaatagctctagacttattgtttaatattcctttaattataggtgcacttataactgttttagatgtttttcttttactctttattatgaaatttggcttcagaaaaatcgaagcgattgtcggaacattaatttttactgttctaattattttcttattcgaagtatttatttcatcacctaaagtgattaatattcttaacggttttattcctcataaggatatcgttacaaatcatagtgtactgtatattgctttagggattattggtgctacaattatgcctcacaatctctatttacattcttcgattgtacaatcacgtaaatatgatagaactaatgagaacgataaggcacaagcaattaaatatgcaacaattgattctaatatacaattaagcatcgcttttatagtaaattgcttgttacttatattaggtgctgcactattttatggtgttaatgctgataaattaggaggattttatgatttatatcatgcccttaaaactcagccgcttctaggatcagtacttggcagtataatgagtacattattcgctattgcactacttgcatctggacaaaattctacaatcactggaacactctcaggtcaaattgttatggaaggatttttaagattatcaattccaaattggttaagacgattaataactagaggtttagctgtcattcctgttataatttgtttaattgtatttaaaggtaatgaaaataaaatggaacaacttttagtactttctcaagtatttttaagtatcgctttaccgttttcactcattcctttacaacttgcaacaagcaacaaaaaattaatgggccctttttataataaaaactggattaacttttgttcttggagtttaattattattctaagcctacttaatgtttatttaattatcgaaacatttaaagaattttttgcataaaataaaactattgttaaggtattgaacatgatatcttaacaatagtttttctctgtattcttttaattcattataacttccataatatcattgcaaaccacactatattaaactttcatatcaatgtcataatatgaatagtatagatttaatttttaataattaatgtaggttttacaaatactccaatagaactaattattgcgattatatcatttcaattatgtatgcattttattttaatttatatctttctattattacatacttatccaattttatttttattgacgataaataaactcccaagcaattcaattcaaattgcttgggagttacacgtaaaactaataaccttcaattattcctgatcaaccgagtgtttctctttgttttcttctttatttaaaatttgtttgcgttcttcataattcattcgacgttgattaacagcacttggctgattctttcttttttctttcatacgttgattataagctttacgtttttcttttttcttagcacgtaattccgctttttctcttttacgttgtgctttttgttctttcttatcaatatataagtctttttctacattattttcatcatcattaacttcattcggcatactattttttgatttatatttatactttctttgtcttgaaagcacgccagaagtatcatcctcatttgaagattgttgatattcacttgttacagcacgtttagggtattgattatatttatcttcctcaatatcctcattaaaatcttgctcatcattattttgagtaatatgatgataatcttcataatcatgttctctttcattataatcacttgaaggtttacgacgaatacgacgttctgattttttagtcttacgaggtggttctatgtactcttcttcatcattatattgagtaggttcttcttcataataatatctatcatcataatcatctctttgattataataagggggataatcgtaagtagaaccatatgctggaactgtttctattttacttcttcttgcaaacatcataatcgctgtaatgaagaagaagattggaataattaatgtaataaataataacactaaaggcaaagtaataatggaagcaattaaaaacaatattccagataaaattctaatattcatagaaatcaaagctaaaaatgaaattaataaacaaatgataaagtacacgataattgcccaaattccattttgtaaccatataacaaattgagtcgtatttagactattgttaactagtatttgttgtattaattgattattattcatggaattttcaagattttgaattgatgtatcattactaaatgatacgagtgcaataaacattgtaataaccgttaatattaataagaaaatccaactaatccaacctaaaagtttctcagttaaacggctcacaggtcgtttgatttgtgtgtatcgttctcctgacatttattacaactccttaattgacttgtcaaattattatatctaatttataggaaaataactactaattatcacttattttaacgacattttaaaattcaagaaactttcgttatattctcctaatgttttctcccctaaatctttataaacttctaatcgtttttgttctttttgagttggataaaaacggtgatcattttttatgttattaggtaataaatttctagccgccttattcggagtagcatacccaacccattctgtattttgtttattatttttagcatctaataaaaagttaataaattgatatgcgccttctttattttgcgcagttttaggaatgaccatgttatcaaaccatacattcgaaccttctttaggaaccacataatcataagtatctccctcttgaacaagtggtgctgctacaccactccatactacagcaatatggccttcattttgttgaagcatcatagtaatttcatcgcctactacccctctaacttgaggggtaagagattgtaagtcttgttctgcttgcttaatatgaacaggattggaatcatttaaactataacccaatttatttaaagctaatcctataatttctctagccccgtcaacaagtaatatgtcatttttgtatttagactgatataaattgttccaactatcaaattgttcattaggatacgcttttttattgtatagaatacctaccgttccaaaaaaatatggtattgaatagttattttgtggatcataagccatattcatataatcagaatccaaatttttaatattgggtattttctgataatctaaaggttctaataaatgtcctctttttaatttttgaacagtatattcacttggaaatgcaacatcataatgtgtaccaccatttttaatttttgcttccatggcttcattcgaatcaaacgtttcataaacaacttgtatacctgtctctttttcaaatttctttattaaatcgggatcaatgtattccccccagttatatacataaatttttttaccagtttttgtatgatcttgagaattaaaccaatgacttattcctaaacatatcaatcctactacaatggcaccgataattaactgaaaaaattgtttcattctattgcacctcttttagcacttctacgttttaatatattttgaagtgcatagtatccaataatacctagcacaatagctaaaaataagattgttgaaatagcatttatttccatactgataccttttcgagccatggcatacacctctactgataagacactaaatccattacctgtcacaaaaaaacttacagtaaaatcatctagggaataggtaagtgccataaaaaagccaccaataatagcaggcattaagtttggtaaaagtatacgtccgagtacttgagattctgtagcgcctaaatcacgagctgcatttaacatattatgattcatttcatatagctgtggtagcacaagaatgactactataggtatacagaatgcaatatgcgatgctaatactgttccaaatcctaatcctaatccaaatatatgacctaaagctgtgaacataattaaaaatgaggcacctatgacaacatcagatgaaatcattagtacattatttaatgtaagtaatgtcaatttaaacttcttatttcgcaaataataaattgatattgctccaaatgttcctataatagtagatactgctgcggatagcaatgcaactgctattgtattgaatattacagacattaaatgatcatcttgaaataaagcttgataatgttctaatgtaaaatgttcaaaatgtaccatatttccagctgaattaaacgaataaaacattaagaaaaaaataggaaggtataatataacaagtaatattcctatataaagtttcccgtaccatttcatttaattcaccctcttccatttgtttctttagatttagtaataattaagataaaggccataaatacaattaaaaagatagctattgtcgaacccattccgtagttttgaataactaaaaattgttcctcaatagatgtaccaatattaatcactttatttccagctatcaatctagtaatcataaataatgatagtgctggtataaatgtaacttgaacacctgtcatcacaccttctttagttaaaggaagtatgactttacgaaaagtagtaaatgtatttgcacctaaatcacttgaagcttgtaataaattattaggaattgatttcatgctattaaaaataggcaaaatcataaatggtatataaatataacttgcaacaagtaaaaacgcacctgatgtaaacaacaagtttagtggaccaatatgcattatacctaacattttattaatcataccttcgtgacttaaaattccaataaaagcatacgtttttaacaataaattaatccatgtgggtatgattaatataagtaaccaaatatttttgaattttgaagatctaataaaataggctgcaggataacttataattagtgtaatgattgttataagtgccgcataaaaaatagaatcccacatcatttttaaatatttcattgaaaagacttgtcgataatttgtaaaactaaagtgaccatttatatcgataaatgaaaaatatacaagtaatagcacaggaataataataaaaataatcatccataataaatatggaatgatgagaaatttatttaaattacgcatgttcaatatcctcataactttcaatacgtttatcaaattcttcttcagtttctccaggaaccataatatgaatagcttcaggttcaaaaaacaaacctacctgacttcctattgttgtctttttagtagattgaataacccattcatatcctttttcatcaatacaacaaatttcgtaatgtacacctctaaaaagcattgaatcgacagttgcagtgaataaaccttgtgtcgattcaactaaagaaatatcctctggacgaatcactacttcaatttttttcccagatggaatccgagcatcgacacattcaaaatcctgaccatatatattcactacaaaatctttaaccattgtgccatcaacaatattagattctccaataaaatcagccacgaatcgattcactggttcatcataaatatctgttggtgtaccaaattgttgtatttcaccatctttcatcacaaaaatataatcactaagtgccaatgcttcttcttgatcatgagtaacaaaaataaaagtgatgcctaatcttttttgtaactcacgaagttcatattgcatttcagtacgtaattttaaatctagtgccgaaagagattcatctaataataaaatttcaggtttatttacaatagctctggcaatagcgactctttgtttttgtcccccactcatttcatcaatatgacgttgttcataacctgttaacttaacaagttttaatgcttctttaacttctttatcaatctcttgtttagaaaacttttttagtcttaaaccaaaagcaatattctcatatacatttaaatgaggaaataaagcataatcttgaaatactgtatttactctacgtttatttgcaggtaatttttcgatagactgatttttataaataatttgaccttcattaggttgttcaaatcctgcaataagttttaaaatcgtagttttaccacatcctgagggaccgagcaacgtataaaaatatcccgattcaatatctaagttcatattatttaatattgttgtatcatcaaatttcttagtaacttttttaaaagataatagtgactccaatccatttcctcctttataagtatgatgctgttgctacaattagaattttaacttcattttctgaattattatgtaattgatgtaattcatttgctctaaaataaaatacatctccctcataagcttgatagcgctctttacctaacgtaagtgttacacatccctctaaacaataaataaaggtatcagattcagaaggttcaaaagatttgtacgatgatccaggcttaattgttattataagaggttccatttcattttcatttgaactgggtacaacccaatttaaaatatatcctctgtcatattcatcataaatagtccgttcactttttttatacaatactttttctttcgctttttccttaaaaaaatcacttggtgtagtacctaatacttctaatatacttaaaaatgtttccatacttggagacgcatattcactttcaatttgtgatatatatccttttgataaatcagttcgttccgctaactcttcttgagtaagatttttttgacgtcttaaattttttaatttatatccaatttgcataactaaccacctaaaaaaagctgtatcttgtttactattatcaaacattttgtttaatgcttaataaaaataacaaaatacagctttaaattcaataggtatattaaaaaattgagattaaattagagatcttaatgtttactaaaattttcttgatcaggatgttttttaacttcttggattactttatagctattatagccacttttttcttcaaattctttaaaaatttgtttttcttcagctttacctggcacaatttgtttaaattttttatattgtttcattagttcagtacctattatagatttttcataatagttttcaatttgattaaaaaatttaataacatcaaccatttcctcattagaccaatctaaatcgagtggatattgatattccataattaccctccaaaatataaacttaattctataaaaaaaggtggaactagattccttataaaatcatagtcccaccgtaaatggttatttcaattatttcaattaaatacgtcgatttaattctcaattatttcaaaaggaaattacatagtatggattggtaatccaatagctttttcagcaacttccatagtcatttcacctaatgttgggtgagcatgaacagttaatgcgatatcttcagcattcatgcctgcttcgatagctaaacctaattcagaaataatatcagaagcaccattacctgctacttgagcaccaataactgtgtcatcttcttttaatgtaattaatttaacgaaaccagttgtatcgtctaatgataaagcacgtccgttagcagcataagggaatttagatgctttgaaatctaaaccttcttctttagcctgagcttcagtatagccaacttgagctaattctggttcagtgaagcatacagcaggcataccaatgtaatcaacttctgatgcttgacctgagattacttctgcagctactttaccttcataacttgctttgtgtgcaagtggtaaaccaggtacgatatcaccaattgcgtagatgtttttaatagaagtacgactttgtttgtctacttctaataatccacgatcagcaaatttaagacctaattcttctaagcctaattcgtctgtatttggacgacgacctacagttactaatacataatcagcttcaattgttttttcttcacctttagcttcgtaagtaactttaacaccgttttcagtttcttcagcgtttttagccatagcttcagtgataatttcaacgcctttttctttcataccttttttaacaggttgaaccatttgtttttcgaaaccgccaagaatttctttagcaccttctaaaattgtaacttcagaaccgaagttagcaaaggcagtaccaagttctgaaccaatataaccgccaccgacaactactaatttaccaggaacttcttgtaagtttaaagcgcctgttgaatcgataacgcgtttaccaaattcaaaattaggaatttcaattggtcttgaaccagttgcaataatagcatttttgaagttatacgtttgagcacttttctcatccataacacgtaaactattttcatctacgaaataagcttcaccacgaacgatgtcaactttattaccttttaataaaccttcaacaccgccagttaatttattaacaactgattgtttaaattcttgaactttatcaaatttaagtgatacgctttcagcaataatccctaaattttcagagtgttgagcttctacgaaacgatgagaagcatgtaataacgcttttgatggaatacatccaacgtttaagcacacaccacctaagtcacctttttcaacaatagtaactttttgtcctaattgagctgcacgaattgcagcaacatatccaccaggacctgctccgattacaatagtatctgtttcaattgggaaatctccaactaccatgttttacccctccattaataataattctggattatttaataagcgtttgatatgattcatagcattttgaccagttgcaccatcaatttgtctgtggtcaaagcttaatgataatgctaatactggagctgctacaatttcaccatctttaacaataggtttttgagcaatacgtccaatacctaaaatagctacttctgggtgattgataactggagtgaaccattgtccaccagctgaaccgatgttactaattgtacatgtagcaccgctcatttcttgagatgttaatttaccatcacgagctttaacagctaattcattgatttcatctgagatttggaaaatagatttacgatctgcatttttaactacaggtactaataaacctctttcagtatctgcagcgataccgatattccagtaatgtttgtgtacaatttcaccagcttcttcattaaatgacgtattcagtgctgggtattttttaagtgcagaaacaagcgctttaacaacatatggtaagaatgttaatttaataccttgttcagctgcaacttctttgaattttttacggtgatcccataagtcttgaacatcaatttcatccattaatgttacgtgtggagcagtgtgttttgagttaaccattgctttagcaattgctttacgcatagcagggattttttctgtagtttcagggaagtctccttcaggtactgattgagtttgaactgcagaagtatcttctgatgttgaagcagctgcactttcatttgaagctgttgctgcttgagcaccgccaccatttaagtggttatcgatgtcttctttagtaatacgtccatttttacctgaaccagaaactgctttaatgttcacgcctttttcacgtgcatatttacgtacagatggcattgctttaattcgtctgttttcgtctactttttcatcttgtgatgttgaagctgctggagtttcttcagttttagcttcttcttttgcaggttcttcttctttagatgaagcatcgtcatcatcatgacctttaaattgcatttcttctgcatctggtgcgtcaattttaacaatgacatcacctacaactgctacagtgccttcttcaactactacttcttcaattgtaccgcttacaggagatgggatttctactacagatttatcattttgaacctctgctaatacgtcatcctcttcaattgtatctccggctgaaacaaaccacttaacgatttcaccttcgtggataccttcaccaatgtcgggtagtctaaattcaaatgccacgttcttatcctcctaagatttaaatatttattatttaaataaatttataacatagaggaaggacagaataatatgtcgtgtctgttaacactttatcattttgtcctacgtctctagtttacaattaattatatatacataaaataaatagaaaatacttattttaaatatatagattcatatatagcttactgttttgtatatactattagaattctaaagtagctttagcttgttcaataatatcatttttatttggtaaccaaacgttttcagcttgagtaaatggatatacagtatcagcagcagcaacacgtgcaattggagcttctaatgaaagaatagcacgttcagctaattcagctgctacagtagcaccaacaccagcttgacgttgagcttcttgaacaactactgcacgaccagttttttcaactgatgcaactaatgtatcaatatcgattggttgaactgtacgtaaatcgataacttctacagagtaaccttctttttcaagttcttctgcagctttttcagattcttgtaccattgcaccgtatgcaattaatgtaatgtcattaccttcttttttgacatttgctttaccaatttcaattgtatattcttcttcaggaacttcttcacggaatgaacgatataatttcatgtgctctaaatatacaactggatcgtttgatctgattgatgaaagtaataaacctttagcatcataaggaccagatggaataactactttaatacctggtgattgagctaaaataccttctaagttatctgcgtgtaattctggagtgtgtaccccaccaccaaatggtgtacgaattgttacaggagcagttttagaaccacctgaacggaaacgcgtacgagcgatttgaccagcaacttcatcaaacacttcaaatacgaatcctaagaattgaatttccattacaggacggaaaccttctacagttaaaccaagagctaaaccaccaataccagattcagctaatggtgtgtcgaatacacggtcttcaccgaattctttttgtaaaccttcagtaacacggaatacaccgccgttaacaccaacgtcttcaccgaaaattaaaacgttttcgtcattttgcaattcagttttaagcgcattgttaatcgcttgaaccattgtcatttgtgccatggcttatttcgactccttctctttgtaaatttcatattgttcagctaaattttgaggcatatcttcatacatgatatccattaaatcaagaacagtttgttttggagtattgtcagcctctttaattgctttcttgatgtcgtctttagcacgttcaataacttcgttttctttctcttcgctccataatcctttattttctaagaattttctgaaacgaactaacgggtcttttttctcccactctgcatcttcatctgaagttctgtaacgagttggatcatctccagccattgtatgtggaccataacgataagtcatagtttcgattaatgttggaccttcaccattaattgcgcgatcacgagcttctttagtagcttgatatacagctaatgcatccataccatcaacttggataccagggatacctactgcaattgctttttgagctaatgtagtagcagctgtttgtttactacgtggagtagaaatagcatagttattgttttggataacaaagattgctggtgctttataagcagaagcaaagttaataccttcgtagaaatcaccttgtgaagaaccaccatcaccagtgtaagtgatagcaactgcttttttaccacgttttttaataccgaatgccacaccagctgtttggatatattgtgcaccgataatgatttgtggactgaatgcgtttacgccttcagggaattggttacctttaaagtgacctcttgagaataagaaagcatcagttaacggtaaaccgtgccaaataagttgtggtacatcacggtaaccaggtaaaatgaagtcttctttttctaaagcatattgagaagctaattgagatgcttcttgtcctgctgttggagcatagaaacctaaacgaccttgtctatttaaagaaatagaacgttggtcaagaatacgtgtccacaccattctttccattaattctactaattgttcatcagttaaatcaggtactaagtcttcatttacgacattaccatctacgtccaaaatttgaaccatttcaaatttcgactgagtatcatttaatacttttactgcatcgaattgggcttgtaacttaggagccattcaattcaccatacctttcccatataatagaaattcattttatccactcatagtgtaccacaattattttagactgttaaacattttcataaagttctgtattactaaaaaaagatacagtctgagaaactgtatcaatgtaacaattaacactgtattagtgatgttaagagattaaatgatcgacgtcttgtttttctttattaactgtattcattgccttagcataagcctggaattttttcttaaagttttcttgagctttattaagcgcattgtttttttcgtctacttgagattgcgttactccatcttgtttgactaattcaaataaatctttttctttacttaatacatttctataagccttagcatagtcgtcatgtgttttatatttgttttttatagcatcatcaagttgtttaacttcttttcttttattatcatttttaatatcgttaatatgagaatcgccttttttaaattgcttttcggaattttttaaaattgaaacttccttatcaaaggttttttctcgtttatcaatattatcaagtacatcgtcagctgctttactacgtgtattactgtcattactatttgcttttttatacaaaccttgtttcttttcttcaagtgaatttagttttttactaacctcatttatagattgttctttatcaaatgctttttgaacattatcgtcataagcttttacctcttttttatcagttgtacaaccagctaataaaagtgtagaggcagctgcaacaactatggttttacgtaatttcattaatgtcattcctcctcatagtgtttcgattgtaatattatataaagatagtttataaatcaaatgaaactatataatgtacgtaaatgtatattatctgttatattttatattatataaggaaggtgtataacatgttaacaatgaaagatattattagagatggacatcctacgttacgcgaaaaagcaaaagacgtgaatttacctctttctgaagaagacaaaaatactttgcgtgatatgcgtgaatttttaattaatagtcaagatgatgaaattgctaaaaaatatggtctacgctctggagtaggtttagctgcaccacaaattaatatttcaaaaaaaatgatagctgtgtatttacctgacgatggggaaggtaaatcttacgactatatgttggtcaatcctaaagtaattagtcatagtgttcaacacgcttatttacctactggtgagggttgtttaagtgtagatgaaaatatacctggtttagttcatcgtcattatagaacaacaattaaagcttatgatattgatggtaatgaagttaaattacgtttaaaaggttatccagcaattgtatttcaacatgaaattgatcatttaaatggtattatgttctacgattatatcgataaagatcatcctcttactccattaccagactcagttgaagtttaatattcaagcctaatgcatttttacattattgtaataaatgtgttaggtttttctttttttattcaatttcctcctacttttactacatataaactgctttatttattctgatacataaggtaaaataaaaattaactgaaatcatagtaaattactatctttcaaaaaatgaacgacatgtatgatttgcctttaagcacagtaaaataaatattattttatattaaaaatttaaaatgcctgttatgtagcattcacgttagatgtgaaaataaataaacatgtatattttatttattttctacttgtgctcataagacaataaataaacatttatttaggaggaaatatatatcatggcagtatttaaagtattttttcaacataataaagacgaagtaattgttcgtgagaacacaaatacaatttatgttgaaggtgaaactgaagaacaagtaagacgttatttaaaagatcgcaattataatatcgaatttattactaaattagagggcgcacatttagaatatgaaaaagaacattctgatcactttaatgtggagaacgctcaataatgaaacaattacattctaatgaagtaggtgtatatgctctaggcggcttaggtgaggttggtaaaaacacttatgctgtggagtataaagatgaaattgttatcatcgatgctggaattaagttccctgatgataatttattaggtatagactacgttattcctgattatacctacttagaacaaaatcaagataaaattgttggtttatttattactcatggacatgaagaccatataggtggtgtgccctacctattaaagcaaattaatgtgcctatttatggtggccctttagctttaggtttaatacgcaataaattagaagaacacaatttactgcgtaatgctagtttaaatgaaattacagaagatagtgttataaaatctaaacattttgaaatttctttttacttaactacgcatagtatcccagaagcatatggtgttgttgttgacacacctgaaggtaaaattgtccatactggtgacttcaaatttgattttacacctgttggtgcgcctgctaatatcgccaaaatggcagagcttggtaaagaaggcgtattatgcttgttatctgactctacgaatgcgctagttcctgatttcacattaagtgaacgtgaagttggacaaaatgtcgataaaattttccgtaactgtaaaggtcgtattattttcgcaacctttgcatcaaacatctatcgtgtccaacaagcggtggaagcagcaattaaatataatcgtaaaattgtaacttttggccgttcaatggaaaataatattaagattggtatggagctgggttatatcaaagcacccccagaaacatttgttgagcctaacaaaattaataatattcctaaacacgagttacttattttatgcactggctctcaaggtgaaccaatggctgcactttcacgtatcgctaatggtacacacaaacaaattaaaattatacctgatgatactgtagtattcagttcttctcctattccagggaatactaaaagtatcaatcgtacaattaacgcattatataaagctggtgctgatgttattcacagtaagatttctaacattcatacatcaggacatggttcccaaggcgaccagcagttaatgcttcgtttaattcaacctaaatacttcttacctattcatggtgaatatcgtatgctaaaagctcatggtcaaacaggtattgattgtggtgttaaagaagaaaatgtctttatttttgatattggtgatgtgttagctttaacacacgattctgcgcgtaaagctggtcgaattccatctggtaatgtattagttgatggaagtggcatcggtgatattggtaatgttgtcattcgggatcgtaaattattatctgaagaaggattggttattgttgtagtaagtattgattttaatacaaataaacttctttcaggtccagatattatttcacgtggttttgtttacatgcgtgaatctggccaattaatttatgatgcacaacgaaaaattaaaacggatgttatttcaaaactaaattcaaatgatgatattcaatggcatcaaattaaatcttcaatcattgaaacgttacagccgtatttatatgaaaaaacagctcgtcgtccaatgattttaccagtaattatgaaagtaaatgaagaataaacacacacggtatttcttaagaaataccgtgtgttttactatcttactatttttttctcaaaacgatttaaatcattatcgtggccgatcattatcataatatctccaatttcaatattcatgtttggatctggtgacacaatgatttctcgtcctctttttattgcaataatattaataccgaattgtgctcgaatatctaaatctctgattgtttgaccagtcaatttttcacttacttttaactctactaatgaatgctcatctgcgagttcaaggtagtctagtacacttgcacttgctacattatgtgcaatacgacgacccatatctctttctggatgtaccacagtatcagcaccaattttattcaaaatctttgcatgataatcgttttgtgctttggccgtaacttttttaacacctaattctttcaatattaaagttgttagtgtactagattgaatattctcacctattgccacaatgacatggtcaaaatttcgtatacctaaacttttcattaccgcttcatctgtagtgtcagctacaacagcatgtgtcgcaatttcactatattcatttactcgagcttcatctctatcaatagccataacatccatatctaaagcatttagctctcttacaatacttcctccaaaacgacctaatcctatcactacatactctttctccatgacttctggaactcctatctaaaaaataagagctaaaatgataagttcatttatatactagaaacttattcaaagttctataaatataaattactctcattttagctcctctcttaatttaaattactttttaccttccacatattgtttatcgaaaacgaataatctcaataacaatattaacgatggaagtaataaaagtaaacctaaaataaagacgattgttaatgctaagcccattgatgagtttacacctgaatctgaaattttaatatatggataaagaatataaggtaacttactcataccgtatccgtaaaaagcgaaagccatttgtaaaattaccataataaatgctaaaccatgatactttttaatcatatttaaaattcctgcaattaagaagaaaataaaactaattgcaaacatccaccaataatgcgtaattgcattataaaagtgattagagttttgtattcttaatgataagaatacaaataatgaaataataatcatcggtggaccccagaacataaaccattgacgcataaatttataagctactttatcttttgctttagaagcataatatgttaaaaatcctgatgatatatataatacacttacaattgctaaaaatacaactgaccatgcgaaaggacttaatagtaactgtacccaatccaaatcaaaatgattgccttgttcattaatgtatccaccttctgagatagtcaatacagttgcgagtgctgcgggtattaaaagtccagtaataccatataaaaatatccagggcagtttattatcttgtccataatgttcaaaagcataaaaactacttctaatagaaataagaattaaagcgattgaaccaggaactaataacactgtccctaaataaagagctgaatctgggaaaaatcctacaaaacctacaaagaaaaatacaaaaaatacatttgttacttcccatacaggatttaaatatctttctataagatgattaatctttttttcttctcccgttaattttgtatgcaaagttaaaaatccagcaccaaaatcaatagacgctacgataatataaaaaaataggaaagtccataatactgtaatacctatgccagtataatccattattcttgacctccaatcactttatcaatatcctcgcgagctggtttatttctaaacattctcaataatacataggcagatgtaaagagaagtacaaaataaagtaaaccgaatagaattgttactaacgtaattcctcctgcctgtgtagcagcttggctaacacgcatgtaacctctaacaatccatggttgacgtcccatttcagttaagaaccaaccaaactctatagcaagcattgaagcaggtcctgttaaaagtactgcataaagcattacttttttagttataataggacgtagtttttttatcattaatgctaatatgaaaatgcctgatacgataaaacaaaagattcccatcgataccattaaatcaaagaaataatgaacgattaatggaggtaaatcatttttaggaaattcatttaaaccttttactttagtattaatattattatcagctaaaaagctcagtaatccaggaatttttatggctcctgaaacttcttgtgttttttcatttaagacaccaaaaaatactaaatctgctttagaatgtgtatcaaaatgccactcgtaggcggctaatttttctggttgtactttatgaagaaacttagcagacaaatctccagctaacattgataataatgtttgaataaatccaagaatcatagtcatttttaacgcttttttatgatatggcgcatcttcactatatttatttttcaataatttaaatgcagcgattgctgccaaaataaacgccatcgtcataccagctgttgcaacaacatgaaatgctctaactaaaaatgaagaattgaacattgcttcaaatggttgaacattaaccattttgccttttttcatttcaaaacctgctggagtattcataaatgagttcactgaagtaataaagaacgctgagaatgaaccaccaataataacaggtaaactaattaaaaaatgtatccattgatttttaaaacgattccatgtatatagataaatacttaaaaagattgcttcaaagaagaaagcaaatgtttccataaaaagaggaagcgcgataacatggccacccattttcataaacgtaggccaaacaagtgaaagttgtaatccaataattgttccagttacaactccaactgcaactgtaatcgtatacccttttgaccaacgttttgctaatgctatatatttaggatctttctttttgatccctaaaaactctgcgattgcaaacattaatggcattcctactccaatagtagcaaaaataatatgaacgcctaatgtcatccctgtcaaaaaacgactaatttcgacagaattcatacttaaccaccttttctataatttaaaattaaagcctatagatttaaattatatacctaaacattagtaactaaaatttttttgtttactttttaatagagaatttaaatggaattcacataaaattcacaatttgcattttttaattaccttatatatagtaagaaaagtataattaaaaggagaatatgatttatgtctaaaataattatctatacacaagatgattgtccaccttgtaattttttaaaaaattatttaacggaacatcatattaattttattgaaaaaaatattaagtatccttcttatcgtaaggaaatgttagaatatgatgcattctctacaccatttatcttattaaatgaggagcctatgtatcaggtagatttagaaaaaattaacaaaatatttgatatccaactgtagtatataaaaaaagaacctgagacatcataagttgtatcaggtatttttaatattatttagaaatgtgatgaacaagttctttaacttcatcttgtgttgcacaattaatggcacgatttgctaattccgtcatttcgtttttacttaaaccattaatttgtcttctagctttaagaatagaagttgcactcatagagaattcatctaatcctaaacctaataataatggaattgctgtttcatcgccagccatttcaccacacataccagtccatttaccttctttatgagaagcttcaataacctgtttaactaaacgtaaaattgctggattatatggttgatataaatatgaaacacgttcagacatacgatcagctgccatagtatattgaattaagtcattagttcctatactaaagaaatctacttctttagcaaagatatcagctaacgcagcagtagaaggaatctctaccatgatacctacttcgatatcatcagcaacttcttgtccttcgctagttaatttatctttttcttctaaaagaatagctttagcatctctaaactctttaatagtagctaccattgggaacataatatttaatttaccataagcagatgcgcgtaataacgcacgtaattgtgttctgaagatgtcttgttgatctaagcacaaacgaattgcacgataacctaagaatggattcatttctttaggtaaatttaaatatggtaattctttatctccaccaatatctaaagtacgtacaacaacacgtttatctttcatagtttctaaaacttttttatatgcttcaaattgttcgtcttcagttggcatttgatctctacccatatataaaaattctgttctataaagaccaattccttcagcgccattttccataacaccatataaatcatcaggtgtaccaatattagcagctaattctgcatgttcaccgtcaacagttacagtttcagcatcacgaagtttttgtaattcttttttatcttcaaagaaacgctcacgtttattttgataagcaatgagttcatcttcagttggatctatgataacgtcaccagtaataccgtcaacaataaccatatctccttgttttacttcatgagtaatcgatttagtacccaccacggctgcaatttctaatgaacggctcataattgcagaatgacttgtacgtccaccaatatttgtaacaaaaccttgaacaaactctttgtttaattgtgcagtatcagatggtgttaaatcatttcctataataactacactttcatcaatcatactaggatttggtaagtccacgcctaaaagatgagcaagtacacgcttagaaacgtcacgaatatctgctgcacgttctctcatatattcattatccatagattcaaaaatagtaatgaattgagtcgtaacttcatttagtgcttctggagcacttactttctcattcgcaattttatcttcaattggctgaattaactctggatcatcaagtacaagtaaatgtgcatcaaaaatagcagctttatctgcacctaatgatttttcagcattatttctaatttttgttaattcaattttggaagcttctaaagcatttctgaactttttaatttcagcatcagtatcagtaatgttctcattcgtaaatgataaatcaggttctactagtaaatatgctttggcaattgcaactccatcagaagctgcaatacctttaattaatttagacataattactctgttaaaccttcttttgataaaacttcattgatcgcttgaattgcatcttgttcatcgcttccatcagcatagatagtgatttcagcatctttacctacacctaaactcataacgcccataattgattttaaattgacttttttaccgttatattctaattgaatatctgaatcaaatttagatgctgtttgcactagcattgtagctggacgtgcatgaattccagtttcgtcaacaattacatatgatttttgttccataatctatttctcctccgtaagttagaaaattaaatttcttattatctaacataaaaatttataccctaacactaccaaaatatataactgaattcaattcttatataattgaattattatagaaaaatacacttatgttagcaaagtagcaatcattatataagtaatcaaacaaagtttgattacttataataggtatagctttatgtcagtcaattttctaatattatatataaatttcttcgcttttattatactacatttttaaaaaattaaataatatcacgtaaaactttttcacatttttctatatgatcttgacctaatttattcataaagtagtaactaattgaagctgaaacagcttgccccactactgggaaccattttgtttgttttgctgctgtacgcttagcaacatctctaataattaatttcaaagcaccactagttactttttcaccaatcattgaactaccttgaattgctgctgctgataaaatacgttctttaacatcttcaccaagagaattgacttgtttttgatcaagaccgtaaattttattaatatcttcaataatatctttcatcaatttgatatctacaccaaagtctaatcctggaattggcacaacactcatccctgaagataataaagattttttcttaacgactgctttagctttttctctgcgttgtgcaatttcttcttcgtttttaggtaagatatctttttcgttaatttcttctatatctaagacttttttaccaactttatcagtaactccatttgtaattttatgaataatccccatttactaactcacctttcgtttttcataatattttcaacatacatgtaataccctatttcagtactttaatgcttaatatttatgaatacagcttttaaatatttagaaggtttataatgtggatgtgttttaaagtcttttggtaatcccatgacttcttctatttcatattctacgttagcttgttccaatgttttcttaattacatttttaaatgcttttaaagaaaaagcacttgaatttgtacatagcaacaatgtaccatctggtgctaaaacatctaaagcaccattaattaaatcatcataatttttttgtactgaaaaagttttctttttattacgcgcaaaactaggcggatcaataactattgtgtcatattgttttccatgacgtgctgcataattataaaaatcaaatgtatccataacatagatatattgacttttaggatctacaccatttaacccaaaattttcttcggttaatgtacgagaacgattagctaaatctacacttgttgtaactttagcatttttagatgctactactgaaaacgcgcccgtataactaaatagatttaaaacacttctattttcggcaaaataatcacgtaattttttacgaacttctttttgatctaaaaatattcctgtcatcaatccatcgtttaaatcaacattgtaaaatgtaaaattttcttcaataactattggaaattctggagtttttccaagtacatgtccccctgtatactccgtatctttaaagcgcattttttcaaaaacagattcaaatttaaatactttttttattgcttcaataattatataacgaaacttgtaaattccttttgaataccattgaataagtaaatgtccattataattatcaatagttaagcctccaacgccatctccctcagcattaaatagtctaaaagcattagttccttctatattgtagtaatactctctttcttctagcgcttttttaaataaattttcaaagaaagtaatattgatatcttcttcttggctatatgtgattacccatcctaagcctttatgttgacgtcctacataagctgttgctatgtattggttattttcagtaactatattaaacaagtcaccttcttttaaatgatcatgttgaaaaatatcttcttcttcaactaaaggatattgatttaaatatttagtttctttgcctttatttaaagttgctattttcattttaatttctcctattttaatttttttaacgaatctgttgtgatttactctactattttaacaaatttaaaattcttcacctaaatattaaattaaaaaaagaagtggaacaatgaattcaaaaatgaattctattccactcccttactcagattatggtttttcttttaattgcaacgaaaatgctataattacaggtattaacataataattaatgtaggtgttataaatattgaaagtaatagaccatgaatcattatattaataaattcagtaagcaatttgaaaaatagaatactaatcataaacaactgtaaatagtaaaatttgcctcttaaaaaatgagtaaatgtcgtagcaatgtaaatgataataataaagagtaatattaacaatgtaatccattcaatcacgtattgagtttgtgataattcccattctccagatacaaatagagcatttctgttattaaattctataaatgtaaataagaataagataaacccacagaaaatttccacatatgctggtttaatccatttaggacgtctcatccacttaggaatatcatcttcttctatatctacaatatttttaaatttacttttaaatttatcgcgtttagatctaattttatctaaatctacacttcttcttgtcttatgtgcatattctgatgttttatcttgaagttgtttaaaatgaacttttgattgagtcgaaacgtttcctttttgagttcttgataattcaggctcttcttcccctaattcttcttttgttaaaggtaacgcacggcgtaagaataagaaattccaaattgccgcttgagctaataaccacataatgatgaagaatgtatttacacttaaaatatcaataggctcaatctcatttgcatcgattttgccatacaatgacatttgagtaatcaagtaacttattccatatgaaataataatccataaataatgaacttttctattttcttgatacaattcatctttataaacgatatatcctgtatgaatcacaaatggaataacgaatataattgcccaaaaaccatatacttgagtcatcaatgtaattgtaatgaggaagtataaaataccaatgactaaaaagaaaattgagatgtcgtaatcgtatttggttgttctaaataacgtatatccaatcaatatgactagaataccaaatagaataattatgactgcacttacaactggaaagttgcctatgaatctactcatcactctaattatttcactaaaaaatgcattaagaaagtcccatatattatgtatttttaagtcaattttatctttattttttagtttatgaattaaaggcaaattgatcaagataatgagacctgtgaagagtgaaacgataccgatcaagtaactatagataatctcggcgtgtttcttaagaaaagacatacagttcacctcaaaattaattatatatgaactttctattcttgtctttaataaaaaataaaatacttctctagactgagattaagtttatccttttattaattgggtatattaattttgtaaagtaatttatgaaaaaggagagttgtcctatgacacatgaagatgcaaaaaaagcaaaagaatatgaagaaaaattaaaagaacaaaaagaagaaaaaactgatgatattgaacaaactaaacaagacgttcaaaatacattagactaattttcttatttatgtcatcattaatagtaattaatgaataagcctgagacatacaagttgtctcaggtatttttaatatattggctatcgatgactgagttggaaataaattgtcctacttttattcaattatttttagaactaattacatttcacttattaaatatgtaaactgtttaattataatttatttttaattaaatatagattaaaagcatcttgacatctactattaaaagtcatacatttaaaataaataaaatataaatgcactaggggtgtatagcactgagatgaggcttaacctcaaaccctttgaacctgatctagttaaatactagcgtaggaaagtgttaacttaaataaatcatgtttttaataatcaatagcatttttatttaaatttacgcacaacttttctacgaagggttgtgcgtttttttaggaggaactattttatgtctaaaggtttaaagctttcagaaattctagttactgtgctgattgctgttatttttgcaatcatttataacttatggtggttgccatataatttagctcaagtagctggtatacatctagaacaacttacatacggtatttggtttatggctgctattgtagcttacttaattattcctaaaccaggtattgcattaattgctgaatttgctgctggtgcaggtgaaactattgttatggggaaatttgatattcctactatagtatatgcaattttacaaggtctagcatgtgaagttgtgtttgctatctttaaatacaaatcacgttctttaatggtagcaatgttagctggtttagtaacagcattagtatctttccctgtagattatttttatggctatctaaacgaagttgcgggttggaacttactacttttcatcattttccgtgctattagtggtattgtactgtctggtatactctcttatttaattgtaaaagccttagatcaaactggagtaactaaattattccgtcctgcctctcaaaaagattacgacaacttataaggggaaatgattgtgttaaaagtcaaaaatttacgtctaaaatatccaaatggtgatcgaaaaattttcgataatctaaatatagaaattaaagataaagaaaaagtgcttttactaggtccttcaggatctggtaaaagcacattacttaatgtactgagtggtattgttcctaatcttatagaattaccgatgaaatatgatgaactagacattgaccctaattcaggggttatttttcaagacccagatacacaattttgtatgccaaaagtttacgaagaattagctttcgtcttagaaaatcaacaagtgccaagagaagacatggatgaacaaattaaaaaagcacttgcgtcagtagatttagatgtagataattcaactttcgtaaataatttaagtggtggcatgaaacaaaaacttgctatcgtcgaaaccattttacagaaagctgatacactctttttagatgaacctacagctatgttagatgtacaagcaactgctgacttatggcaacgactcattcaattatggactgatcaaacggtattaattgtagaacataaagtggaacatatttggcatcatgtagatcgagtcatattaatgaactatgatggagaaattatagctgataatacacctgaatacatactcaaacattgtgaatcgttacttactgaatttggcgtatggcaccctcatgcatgggattatgcacctatacgaacagatttaacaccacagacttctaaaacactttttaaatttcaaaacggacaaataattcgcagtaaaaatacactatttgaagttccagaactaaatattcatcctggagaatggattacaattactggaaaaaatggagctggcaaaactactttacttgaatctatgatgcaattagtgaaatacaacggtacaatgttttatgagaaccgattactgaagaaaattaaagatgctgctcaaaatatgtatcttgtataccaaaatcctgaacttcagtttattactaattcagtttatgacgaaattaatattcattataatcatcttgataaagcaaaatcgaaagaagaaactgaacatcttttgaaacttttacatttagaaaaagttaaacatcatcatccttttgaaatatctacaggtcagaaacgccgattgagcgtagcaactgctttaagttcaaaagctgaaattgttttattagatgagccaacatttggacttgatagtcataatacatttcaattgattaagctgtttgaagaacgtgtaaaacaaggacaaactatcgtaatggtgacgcatgaccctgaaattattcatcgttatccaacacgtcgacttgtcgtagaaaatcataagcttttagaaatggcaggtgaatcaaatgtttgaacgttggaaaaagcgtcatacacttgtagatgatgtaaacattattacgaaattaattcttggagttttattatttatttttatcatttttgtgcataattttgattatatgatttatattactttattgatgtttatatttttattatcttttaatggtacagcttttaaagtcattgctgcatttttatcagcaaccattctctttgccttgctatcatcattattcatgattttatatggtgatggtacacatatgttatttgaatggggaattattcatattagtactgagagcattgtaagaggtcttcacttatttttaagaacaattacagtttcaatgtttggtgtgttgattgcattaacatcacaaattgtaatgattttctatagtttaatgcaacatttaaaagtaaaacctaaaatcgcttatgcatttatggctgctattcgtatggtaccacttattttcacatcatttatccaattaagacgttctttaaaaatgcgttaccaaatgattgatgcttccaattatcgtggatttaaacgtataaaacacttacttattccagtcttaagccaaaacatacgtcgtgcacatcaattatcagtagctatggaatcaaaaggatttaaagatggcccacgtacctattattataaagcacctttctcatacaaagatattctttttattggtatgacaattgctttacttattattgctttttatttatctcaatattttccaatcactggtattaaagatgctcgtgtttcagaaatgttagagtaatatataacataagacaaactaaagtaaagattgagttcaaagataaaagcagtttcaaaaacacagtaaattcatcttgctagtatattaagccctagcattataaaatacccatagatgaatgtcatctatgggctattatttttagtttatttgagcgctttatttccaatatctttacgataaaatagttgatcactcttaattttttctacatttccataagcatctttttgtgcttgttgaatagtttttccttttccaatggctaatacaactcgtccgccagatgtaagaaatgtatcattttcttttttcaaaccactaacgaaataatggttatttacttcaaagcctgaaacctctgcacctttctcatatgacccaggatagcctttcgaagcaagcattacccctaccacataatcgtcaatccattgaaaacgaataggttctttacggtctagagctacgatttgtgccatcaagtcactttctagacgacttaacaatacttgcgcttctggatcaccaaatcgtgcattaaattcaataactttaggaccttctttagttaaaattgcacctatataaagtaaaccaaaatagtcataaccctcttcttttaacgctctagcaattggttgagcaatatctttgtttgtacgctctaaaacgtcatttgaaatatggggaacaggacaataagcgcccatcccaccagtattaggaccttcatcattatcataggcacgtttatgatcttgagcaatacagtcaaaaggaactgcataatccccattaatgaatgtcattaatgaaaattcttctccttcaagaaattgttcaaagacaacttttccatcttcttgtggatatagcacttctaccgcttcaattgcttcatctcgtgtattagcaataattacgcctttaccagcagctagcccatcctttttgactacaataggtaattcgcattcatttacataattaagtgcctcagttttattgtctatttctttataatcagcagttggaatatcatatttttccattaaccttttagcaaaagatttagaaccttcaatttgggctgcttctttgttaggaccaaaaactttaacatgattgtctctcaatttattagataaaccatctatcaatggttgttctggaccaataatcacccattctatgtgatgttgttggacaaattgtaaaatagcctcatgatcagtttcagcaatttcagtgtgtacttcggctaaatgagtcattgcatcatttccaggaatagcataaagtttttcaataagtggcgactgatgtaattttgatactaatgcatgttcacgaccgcctgcacctataactaaaacattcatttcttttctccctctattctctcaattattttaaattagtgtttaaaatgacgcataccagtagtaaccatagcaataccatgtttgttagccatatcaatcgaatcttggtctttaattgaaccgcctggttgaataatagctttaataccatgttttgcagcaagttcaacagtatcatccattgggaagaatccatcagaaatcattactacattgtcatttatttcaattgcgcgctctaaagcaatcttagctgcacctactctattcatttgtcctgcaccaattccaactgtctgtttattattacttaaaatgatcgcattacttttcactgatggaataactttccatcctagaagcattgcctcccactgagcatcggtaggttcaacgtctgtaacaactttcatttcctctttagacacttcataattatctttatcttgaaccaaatatccacctgagactgaaacaaattcttcttcacgattatcaattgtcatatcaatttctaataagcgaatatttttcttttgagttaaaatatctaaagcttctttatcaaattttggtgcaatgacaacttctaagaaaatagagtgtaacgtttcggctaaatctttggtaacagttctatttagtgcaataatccccccaaagatagactgattatctgcatcatacgcatttttaaatgcgatttcaatatcagtgccaatacctacaccacatggattcatatgtttaactgcaacggcagctggttctttaaattttttcactaatgctaatgctgaatctgcatctttaatattattaaaactcaatgccttaccatgcagttgtttagcaccagcaatagtatgtttactattagaagtacgaacaaaacgtgctgattgttgaggattctcaccatatcttaattcttcactatctcctttgaagaaacttacaattgcatgatcatattcatttgtatgttcaaatactttaatcattaatgacttacggtatgattcatcgagtcgatgttccttaattcgttgaatgacttcattataatcagatggatggacaatagttgttacatgtttaaaatttttggctgcagcacgtaacatggttggaccaccaatatcgatattttcaattgcatcatcttcagttacatctggattagctacagtttgttggaaaggatataagttgaccacaaccatatcaattaaatcaatgtgttgttctgataattgttctaaatgttcaggtttattacgatctgctaaaataccaccgtgtactgctggatgtaacgtttttacgcgaccatccataatttcagggaattgcgtcaactctgatacagatttaacagttacatttgcttcttctaaagcacgttttgtaccgcctgttgaatacaattcataatctaattgcgttaatgatttagcaaattccacaattccacttttatttgaaacactaataattgcttttttcatgattaactatgctccttatttaataactttagctattacacttggataaagttcatattctaattgtttcacacgttcttctaacgtttcttttgtatcgtccgggtttatatcacattttcgttgttcaattatttctcccgtatccattccactatctacatagtgaactgttgaacctgtttccttatcgccactattaaatgcttgaccaattgcatctttccccttgtactttggtaataatgaaggatgaatattcaatattttaccttcataagcatttaataagtctggtcccactaatctcatataacctgctaagataatccactccacttcttcactatgaagaagttgaattaatttttgttcatattctcctttgttttcaaagtctttaggttcattaatatgaaccatcactttcaactgttttgcacgctcaatgcaataagcatcgtgatgatctgtatacaaagaagtaatttctatattattaagctgccccttatcaactttagatacaatattttcgaagttacttcctgatccagaggcaaatatagccaccttagtcatatctataccccctcaagataaatcggtgcatcattacttttaacaatttcccctatttgatatgcagcaatatcttgttcttttaagacatcaagtgttttatatacatcttctttatttacaatgacagtatagcctatgcccatattaaaaacgttatacatttcactcgtttcaatgtcagcttgttgttgtaaccattcaaatacttttggtgttgggaaggattgtgtatcaattttagctgctaagcctttaggtaagcctctaggtatattttcataaaatccaccaccagtaatatgattcatgcctttgattttaactttttcttttaaagttaaaataggtttcacatacaattgagtcggagctaaaaatatatcaagataagtacttccatcaaatgaatcattcaaattaattccagattcttcaattaactttctcactaaactatatccattagaatgaataccattagaagctaaaccaatgataatttgtccttcttctacttcagatccatcaatatattcatctttttcgactgctcctacagcaaaacctgctaagtcatattctccttcgtgatacatttcacccatttcggctgtttccccaccaataagagcagtatgagtagcttcacaaccatcactcacaccttttacaatttgctctatcacttccggaacaactttatttgttgctatataatctaaaaaatatagtggttctgcgcccgttgtaagaatatcatttacacacatggcaactgcatcaataccaatcgtgtcatgcttattatgatcaatggcaagctttaattttgttcctacgccatctgtaccagagactaatactggtgttttcatattaagctgggataaatcaaaagtcgcaccaaatccacctaatccaccaagtacttctttacgcattgtacgttgaacatgactagacattctttctaccgcttcataacctgcatgaatatcaacacctgattgttcataagctttagacatgtatatttccctctctatcaaaataatgtttatgattatcaatatattctttttgacgtgtacttaaattatttaaatagttttcttcatagtcaaatagacctgctggataatctcctgtaaaactttctacacataacccactatagggtgcatcaaaatctaatccaattgattctataagaccctcaacacttaaatatgcaagagaatctgcgccaatatactcacaaatttcttctggagatttattagcagaaatcaattcagcagtcgtagacacatcaattccataaaagctagggaacataaattctggagaagctatacgtacatgtattttatttgctccagcatctttaagcattctgacaatacgtttacttgttgttcctcttacaatagaatcatcaactaaaataatgtctttaccttctacaatatctttcactgccgatagcttaacgcgcaccccttgttcacgtaattcttgtgtaggttgaataaaagttcgtgcgacatattggttttttacaagccccatttcataaggtaattgaatctcttcagcatagccactagctgcagataatgatgaatttggaacaccgataaccatatctgcttgagccggactttcttgagctaattttttaccagaaactttacgaactgcatgcacattttttccagcaatggttgaatctggacgcgcaaagtaaatatattccattgctgaaatcgctgtgttagtatgacttgtatatgattttacttcaataccattatgattaatgataacatactctccagcatgaatatcttgaacatattctgctcctagcacatctatggcacatgtttcactagccaaaatgtatgttccatcttgcatcttaccaactactagaggacgaatcgcatttggatcaacagcaccatacaaagcgtctttagtcaatattgcaaaagtaaatccgcctttaatttgtcgtaagctttcttttagcgcctcttcaaatgtaggagctttactacgacgaattaaatgcataatcacttcagtatcagaagatgagtgaaaaatggcgccatgtttttcaaggtattgtcttaaagtttgtgcattaattaaattaccattatgacaaattgcgacactcatatcgtagaaatgatataaaaatggttgaatgttttcgatacctttatttcctgatgtcgcataacgaacatgtccaatagcatggttgccatcttttagtttattaagttgtggttctttaatggcttcagtaagtaagcctaaaccacgttcaccctttagagtatcttcatcagaaactacaatccctgcaccttcttgccctctatgttgtaaactatgcaatcccatataagttaactgagctgcttctgaatgattccaaatgccaaagacaccgcattcttcgtttaatccactgtagttaaacattctgaaatagctccttcccaaattgctttaatatctgagactttttctgtaattgtagatgtagtattagatactttaaattcatcaacatctgttaattcaccaattttaatagctccatcgacatcaagtgtttgtccttctttgactgcaacgacataacgtccttgtgtttcactaaataattgtgcatcagagagttctacttttgcttctaatcctaaattataataagcacttattttagcaagcgtaataagtaaaccgcctttacctacagtttgtacatgagaagcaattccatttctaatagatgtttttattgcttcgccttttgccacttcatcacctaaatcaatttcttcatactcatgattgactttactatataaaagtttttcaatttgacttccaccaaagtcatttcttgtttcccctacaagatataatgtatgtcctgtttctggatgaaaatcatttaaatattgaatatcttcaatgagtcctaccattcctactactggtgtagggaaaatagaagttcctctagtttcgttatataaagaaacgtttcctgatactactggtgtttttaatacttcacaagcttctgccatcccttttgtagaatcaatcaattgttgataaatgtctttcttttctggagaaccataatttaaacagtctgtcatagctaatggtgttgcgcctacagcaattaaatttctataagcttctgccacaaccatttttccaccttcgtaaggttgattaaatacatatcgagcttcaccatcaatggttgaagcaatagctttatttgttccttcaactcttactacagatgattgtagtccaggtttaataatggtattagcacctacttgttgatcgtattgctcatataaataatgttttgaagcaattgttggatgctttaataatttcttaaatacatcttgtacattgatctcactataatcattttttgaagtattatattctttttcttcaccttctaaaatatagacaggtgcttcatcagctagtgcatcaacaggaatatctgcatatacttcatcttcgtatttaagaacgaagcggtcagtattcgttacttcaccaattactgcactatcaagttcatgtttatcaaataagtccaagaatttttgttctgttcccttttcaacaacaagtaacattctttcttgggtttcagataacatcatttcatatggtgagattcctggttcacgtgttgggacttgatctaagtgcagtactaatccactaccgcctttagcagccatttctgatgaagaagaggtaagacctgctgctcccatatcttggatacctacaagttcatcaaaagtgattgcttcaagtgtggcttccattaattttttacctacaaaagggtcaccaatttgtactgaaggtcgtttactttcactttcttcagttaattcttcagatgcaaatgtggcaccatgaataccatcgcgtccagttttaaggcctacataaatgactgaatttccttcacctttagcagtacctttttgtaccatatcatgatcgataacacctacacacattgcattgacaagtggatttccatcgtaacgttcatcgaattcgatttctcctgctgtagttggtataccaatacaattaccgtaaccaccaataccacggacaacgccttttaataaacgttgattttgttttactgataattcaccgaatcgcaaactatttagtaggttaatgggtcttgctccaatcgatacaatatctctgatgatacctcctacaccagtagctgcaccttgataaggttcgattgctgaaggatgattgtgagattctactttgaaaaccaccgcttgattatcaccaatatctacaactccagcaccttcgcctggtcccataagaacatgctcaccagttgtcgggaattgctttaagaaaggtttagaatgtttataagagcaatgttcactccacatgactgagaaaatacctacttctgtaaagttaggctctcttcctaaaatttcacgtaccttattatattcttcatcacttaaacccatgtcttgatatagtttttcaagtttaatttcttcaatactaggttcgataaacttagacattttgttccctccaactatttaccattgcttcgaataatttgacaccactgtctgtaccaagaagtgtttcaagtgctctttcaggatgaggcatcattccacatacattgcctgctttatttacaatacctgcaatatgttcatgagacccattcgggttatcttcatatgttaaaataatttgattattttcaactaattcattgtacatatcatctgtacaataataatgtccttctccatgtgctacaggataaacaacaatttcattttctccatataaattagtaaaaggagtttgattattaacaactttcagtttttcatttctactaataaatagatgtgaatcattatgtaataaggcgccgggtaatagtcctatctcagttaaaatctggaatccattacatacacctaaaacgggcttaccttcactggcaaaacgtttcacttcgctaataattggagcgacacttgccatagcccccgaacgtaaatagtcaccaaatgaaaaaccacctggaattaataccccgtcaaaaccatttaaagatgtttcacgataatctacatattcagcttctgcacctgttttaatagctgcattatacatatctctatcacagttagatcctggaaaaacgagaactgcaaatttcatattatgcattctccttttcatcaacaattttataactatattcttcaataaccgtattagcaaataacttttcgcttaatgtcgtaataatattatttactgcttcatctgtagcttcatcaacagtcatatataatactttacctactctaatgtcattaacttgtttataacctaagtcatgcacagcgcgatttaatgcttgaccttgtgtatctaatacctgtggttgtaatgtaatgtgaagttcaattgttttcattattttagttcctccaatttatccaaaaatgtttgatacgtatctattaaagaaccagtatcgtttctatatacatctttatcgaaattcgtatctgagtatttatcccaaatacgacaagtatctggtgaaatttcatccgctaataaaatatcaccattttctgtttttccaaattcaactttaaaatctactaatcttaaatccatttcattcattaattgaattaatactttattaatatttttagccatatcttttaatgttttaatttcctcatcattagcaatatgaagtaatttgacatgatcatcagtaatcaaaggatcatttaaatcgtcatttttataaaagaactctacaagtggttcatcaaatacgtggcctttttcaaaacctaaacgtttcgtaatagaacctgttgcgatatttcttacaactacttctaatggtataatctttacttctttaactaattgctcagtttcagaaagctgtttaataaaatgactttcaataccatgtttatttaaatattcaaaaataattgaagtaattcgattatttaaacgtcccttcccttgcatcttatcctttttagcgccgttacctgctgtgacttcatctttgtattcaactctcaactgatgtactgtttctgttgaaaatactcttttcgctttaccttcataacgtaatgacattgattattctctccctttaaattgtttcaacatttcattttcagtttcattaacattatttgtaagaatggtcatatgtcccatttttctatctggttttcgttctgtttttccatagatgtggacatgccattcaggatgatctccaaatttatcttctaataagtctaaatcgcgtcctaataaattcatcatcactgctggttttaaaatttctatctcttgaggtaaatcttgaccagttactgctaaaatgtgtgtatcaaattgagaataatcacatgcttcaatcgtataatgtccagagttatgtggtctcggtgcaatctcatttacatataagtgatttgatttatcaataaagaattccacggtaaaagtaccaacaaagtgaactttttcaattattttatttacttcttttctcgcttcttgttctttatcgcatctagctggaataatagttttaaatagtatttgattacgatgctcattttcttgtagtgggaaataagcaatttgattttgattaccaatcgttacagttaaagatacttctcgatcgagatctaaaaatttttctgccacacattcatgttttgaaacaagcgctttagcttcttcaatattggaatcatttttcactaaaatttgccctttaccatcatatccaccaaaacgtgtttttacgataaatggataacttaatgtttcaattgcttgattcaaatctttttcatcttttaaagatacataaggaacaatttttgtacctgcagattctaatgtttgtttttcagttaaacgatcttgtaataattcaattgcttgataactttggggaatgttaaattgttgagttagttgcttaagctgttgagcagatatattttcaaattcataagtaatcacatctgattgttgacccaatttatttaaggcttcttcatcatcatactctgctgtgataaaaacatctgctactgatttacatggactatctggattagaatctaaacacgctacattaaaacccattttttgggcagattgtgccatcatcttacctaattgtcctccaccaataataccaatcgttgctccgaactttaatctattgaagttcatcttgcatttcgcctaccttatctactaaagattgttcatattgttcaagatgtttacgaactgagtcatttccaatacttaaaattctcgctgctaaaataccagcatttttagctccagatttaccgattgccgttgtagcaacaggaattccaccgggcatttgaacaatagataatagtgaatctagtccttttaaacttttagattcaataggtacaccgataacaggtaacgttgtcattgaagcaaccattccaggtaaatgtgctgcaccaccagcgccagcaataataacgtcataaccatttgtacgtgcttcacttgcaaaatcaaacattaattttggcgtacgatgtgctgacactactttcttttcatatggtatttcaaattgttctaacattgcacaactttcttgcataatcttccagtctgaggaactacccataatgactgctactttcactttgtacaccctttcaaagtttaaaatataaatcttattagttgtatattacacgtatagcataccaagtataaaatttaatttcaatcaaaaatcgaactttattcgtgttttttaacttaatttacgttttctagttaaaatttgacgtttttatacctttaaagttaatctatagacagatatttaataaacaaggaggaattttttgtggttgcaaaaattttagatgggaaacatattgcaaaagattataaacaagggttgcaagaccaagttcaaactttaaaagcaaaggaatatacaccaaaattatccgttattttagttgggaatgatggcgcaagtcaaagctatgttaattctaaaaagaaagctgctgaaaaaatagggatgatatctgaaattatccatttagctgaagacacttctgaagaagatgtattaaaagaactagatcgtttaaataatgatgattcggtaagtggcattttagtccaagtacctctacctaaacaggttagcgaacaaaaaattttagaggcaattaatccagaaaaagacgttgatggtttccatccatcaaacattggtaaattatacattgatgaacagacgtttgtcccttgtacgccattaggaattatggaaattttaaaacatgcagatattgatctagaaggtaaaaatgctgtcgtaattggccgaagtcatattgtaggtcaacccgtatctaagttattattacaagcaaatgcgacagtaacgatcttacattcacgtactaaagatatgcatagtcatttaaaaaatgcagatgtaatcgtcagtgcagtaggtaaacctggattagttactaaagacgatgtaaaagaaggcgcagtaattgtagatgtaggtaatactcctgatgaaaatggtaaactaaaaggtgatgtggaatttgaagaagtaaaagaaattgcgggtgctattactccagtaccaggcggtgtaggtcctttaaccattactatggttttaaataatacattattagctgaaaaaatgcgtagaggcattgaataatttaaattcaagcgtttattataaaaaaagagagcgacataatttcacattaattatgccgctctcttttttcaataatatattacatttatactgacacacttaattttggaacaaatgtttcataatgaatatgttcttggcttatgcctatttcttttaatacttcaatcactgattgaataaatttagcacttccacaaacatatacttcactatcattattcacataattttcaagcgtttctttagttaaataacctttagcttgtctatcatataactcatatttcgctttgtcgtagcgttttgaaatatctcttaaatgagaagtgaatggtgtatcattaacgtctccagttacttgaataaactgtgcatgacttccattttcagctacttcatcaaacattgaaacaagtggtgtgacaccaatacccgcaccaataaacaattgtggttgttcttgattaaccacaccaaatggacctactggagctgataagttaatatcatttccttcttttaattcatcatgtaaaatagttgaaacttcaccttcatggtctgtagatacatcacgtttgacagcaaaagttaaatgattgttatcaccactaacaattgaatagtgacgttttgcacgataaggcattttttcactgcttacatcaactgtaatatattctcctggtgtaaattgacttaaatcatattgatctgatactaccgtaaaggctttaatatcagatgaaagttgttcaattttttcaattttaaatggttggaaaccttcccataacattttactataaatatctttttcaacttgaataaatacatcagcaatttcttgatatgcttttttccaagtttgaataataggatgactatcttctaatcctaaaacggctttaattgcttcaattaagttttcacctacgatatcgtatccagctggtggtacttgtaacgcacaatgtttatatgcaatttctttaacaactggcaaaatattttctaaatgctcaatattaactgcagctgctaatacactttgagctaaagcagtagattggaatcctttttgttggttagtttggttaaacatattttttaactctggatgttgttggaacattctattgtaaaaataagaagtaatctctgttcctctttcttgtaatactggaacagtttcttttacaattcctttttcttgttctgttaacatgcaaatccactcctacttaaaataatatgtgtaaaatatagttatttcccacaaatatattttagtacgatacttattataatgtaatatagtttttttaaattcacagaactttcattttacataaatttaatatttatttatcttaagttcatttaaatttaatcttgaataagctatattaagactatagtatgatgttaaaaatcagaaattaaagtatagttaaattattcaaaagacttattatattcggaggttaacgtaatgaataaactcatacaatctctttcagctctcggtgtctctgctactcttgtgaccccaaatttaagtgcagaagctactacaaatcatactccacagcttaaaggagtaaatgatattgttattgaaaaaggtcaagattataatgtattaaatggaattagcgcctacgataaagaagatggcgatttaacacataaaattacagttgatggtcacttagatacgtcaaaagtaggtacatatgaagtaagatataatgtcatcgactcagagggagccgaagaatcatcaacacgttacataaaagttaaataaatgtgtcaattttctgaaaaagacgagataaacatcttgtcttttttatttaatttttattgtaaacgctagaattgataatgtttctcaaatgtaacgactgattttctatttttgacatttttcacagaatagacacataattttaacaaaccttacattccccgtcattcctattgttactagttttttcctatttattattgtaatttttttctaataaggtcttgtaaatatcgcgtaataaactaaaattaatggtaagccctacatttgtagtattaggaggtcaaaaaagtgtcaaaatttaagtcgttgcttcttatgtttggcacactaattttacttagtggttgttcaaacttagaagtgtttaatgcaaaagggccagtagcaagtagtcagaagttcttgattatttactcaatcatcttcatgcttgttattgttgctgttgtacttactatgttcgctgtttttattttcaagtatagttacaataaaaatgacgaatctggtaagatgcaccacaattctttaattgaaacaatttggtttgtggtaccaatcttaatcgtaattgctttagctattccaacagttaaaacattatacgattacgagaaaccacctgaaagtaaagaagacccactagttgtctatgcagttagtgccggatataaatggttctttgcttatccagaacaaaaggttgaaacagtgaatacattaactattcctaaaaaccgtccagttgtatttaaattacaatctatggatacaatgactagtttctggattcctcaattaggtggtcaaaaatatgccatgactggcatgacaatgaattggactttaaaagccgatcaaactggtacattcagaggacgtaactctaactttaatggtgaaggtttctctcgccaaacatttaaagttcactctgtagaccaaaaagatttcgatgcttgggttaaagatgctaaaagtaaaaaaactattagccaagatgagtttgataaacaactcttaccaagtactccaaataaagaattaacatttaatggtactcacatggcattcgtcgatcctgcagctgatccagagtatatcttctatgcatataaacgttacaactatactcaaaaagatcctaacttcgttgctgaaaaagatctttataaagatgtaacagataaacctcaaaaaccagctcgtaaggtaacagttactaatgtcaactatcctcgtcatggtatgaagccaatgattttaggcaacaatgacccttacgatagtgagtttaaagatgaagaaactcacaacgctaaggaaatggaaaaaatcaataaaggagctaaagacgagaatgcgtctaaagcagataatgatcatggaggtgaacattaatgaattttccatgggatcaattactcgttaaaggtaactggatgattacaatggcacaaatcggcgcgccattcctaattattggtttaattgcggtaattacttatttcaagttatggaaatatctatacaaagaatggttcacatccgtagaccataaaaaaatcggtttaatgtacttaattagtgcagtattaatgttcgttcgtggtggtattgatgcgttattacttcgtactcaattagctattcctgataatactttcttagaatcaaatcactataatgaaatttttagtacgcacggcgttattatgattatctttatggctatgccattcatttttggattatggaatgttgttgttccattacaaattggggctcgtgatgtggcattccctgtaatgaacaacatcagtttctggttattctttgttggtatgattttatttaacctatcatttatcgtaggtggatcaccagcagctggttggacaaactatgctccactagcaggagaatttagtcctggtccaggagttaactactacttagtagcaattcaaatttcaggtatcggtactttaatgacaggtattaacttctttgtaacaatacttagatgtaaaacgcctactatgaaatttatgcaaatgcctatgtttactgtaactacttttattacgacattaatcataattttagcattcccagtattcacagttgttcttgctttaatgacagctgatagagtattcggaactcatttctttacagtagcagatggcggtatgccaatgttatgggcaaacttcttctgggtatgggggcaccctgaagtttatattgttatcttgcctgcatttggtatttattcagaaattattccaacatttgctcgtaaacgtttattcggtcaccaaagtatggtgtgggcaactgctggtatcgcgttcttaagtttcttagtttgggttcaccatttcttcacaatgggtaatggtgctttaattaactcattcttctcaatctcaacgatgttaatcggtgtacctaccggagttaaattatttaactggttattaacattatataaaggacgtattacttttgaatcaccaatgttattctcattagcctttatccctaacttcttattaggtggggttactggtgtaatgttagcaatggcatcagctgactatcaatatcacaacacttatttcttaatagctcatttccactatacattggttaccggtgtagtatttgcctgcctagctggtttaatcttctggtatcctaagatgatgggttataaattaaatgaaaaattaaataaatgggcattctggttattcatgattggatttaatgtatgtttcttaccacaattcattcttggattagacggtatgccacgtcgtttatacacttatatgccatctgatggttggtggttattaaacttaatttcaactatcggtgcattaatgatggcagtcggcttcctattcttagtagtaagcattatctacagccacattaaatctccacgtgaagcaactggagataactgggatggtttaggtcgtactttagagtggtcaacagcttcagctattccacctaaatacaacttcgcaatcactccagattggaatgactatgatacatttgttgatatgaaagaacatggtcgtcatttcttagacaaccataactacaaagacattcatatgcctaataacacgcatactggtgtatttatgggtatattcatgttagttggtggtttcttcttaatcttccaatctatcattccattcctaatttgtgtagctggtatcttcggaactatgatttatcaaagttttgtacaagatcacggttatcatattccagcttctgaagttgctgaaaacgaagcacgtttaagagaagcacgtattaaagaaagggaggctgtaggtcatgagtcatgatacaaacactattgattcacgtacgcatgaaggtcaattgaataagcttggcttctggattttccttacagccgaatttgcattattcggtaccctatttgcaacgttattaacgttgcaacatgggggcagttacggtggtaaaatgacaactgaattgtttgaattaccacttgtcctaattatgacatttgccttattaatcagttcttatacttgtggtattgcaatttactacttacgtaaagaagaaaaaggcaaaatgatgttttggatgattttaacagtaatccttggcttaatatttgtcggattcgaaatttatgaatttgcacattatgcttctgaaggtgtaacacctaaagttggctcttattggtcaagtttcttcatcttattaggtacacatggtgcccatgtttcgttaggtatcgtttggattatttgtttattaatccaagttgcaacacgtggattaaataaatttaatgctccaaaattatttatagtaagtttatactggcacttcttagatgttgtatggatcttcatctttactgccgtatatatgatagggatggtgtatagcggatgaatacaatcgtaaaacatacagttggctttattgcttcaatcgttttaacgttattagcagtttttgtaactctatacacaaacatgacattccatgctaaaacaacaattatctttggttttgctttcattcaagctgcattacaattattaatgttcatgcacttaactgaaggtaaagatggacgtttacaatctgccaaagttatctttgcgattattattactttaatcacagttattggtacttattgggttatgcaaggtggccattctagtcacttataattcaatttctaccttacttaaacaaaaagcctgtacgagttttttaacttgtacaggctttttgttttgtttatattaatgacttctttgtgtatgatagatataagaaaaagtaaaaatctttggaggggtattcatgtcattacctattattattgatactgatccaggtatagatgatgcagcagcaatcgctcttgcattatctcatacaaaatttgatgtcaaaatgatttctactgtaaatggaaatgtaggtgttgagaaaaccacagcgaatgctttaaaattaaagtcctttttcaatagtgaggtccctatacatagaggagcttctcaaccattaataagtgaaatacaagatgctagtcatattcatggagaaagtggtatggatggctatcaattccctacaatttctacttcagatttagcatcttctcatgctgtagaagctatgaatgagatattaagtcattctaatgaacctattactcttgtaactttaggccctttaacaaatatagctctactttttaatacgtatcctgaatgcaaaaactatgttaaagaaattattattatgggggggagtactggaagaggtaatgttactcccctagctgaatttaatatttattgtgatcctgaagcagcccatatcgtttttaatgctggtttacctttaacgatgattggattagatttagcgcgccaatcattatttactcattcttatttagacactcttaaagatgaaaacaaaacgacacaaatgttgtatcatattttccaacactatcgtggtgaagattttaaagaaggaataaaattatatgatgcatttacgattctttatttacttgatcctaagagttacgaaattaaagaagcagatgtgcaaattgaattacaaggggcactgactcgtggtgctactgtagttgattttgaatcttcctatcctaattgttccgtagtcgtatcaagcataaatgaacattataaaacaatatttttaaatactttaaaaaattaaaggtcgaaacaattaatgttccgacctttaattttactcttattgataataagagtgttgatttagtattttatgataaatatatgagattcgcttttcatttgttactttagaattatcacctatatttgaagcaagtacgatgacataatgttgattgaaatagacagtaaatatttgtccatagaacacaccattaattctgttatattgcggtgtaacataaaatccatatcgataagattcaggatatgctgttgttcctaattgctgagtcagtggtattgacactgattcactaaaaatattattatttttaaaattatttactaaatgagccatatcatatgttgtcatatataagttacccgctccataatattgatctaatatatttggtttcatagcagttaatttaccgtcaatcattttatatccagtagccatatgttttttatatggtttttcattaaagaaagcactatgttgtaaactaaatggttgtgctaaatcatcataataatttgcagcataggatttatgtgtaactacttctattacttgagcaagcactaagtaattagcatcattatataagtgtttatgataaaatttttcatcaattccccttgcttgtattgcatgtactgcaccatcaagacttttagttttaggagaagcttcaaatttatatagtccacttctatgtaacattagatcttttaaagttatattttttgtcgttttaaaccaaggtaaatatttagtgagaggatcatttatattcactttattttcattttctaatttttttagaattaatccagttgtaaatttctgtgcggaaccaattaaatacattgtatttggtgagtttttagttttatgctgaaaattttgataaccgtatcctttattcaactttaatttaccattttcaagaactgtaactgccccattaaaatgaattgcttttaaatattcatcaatatttttgatatgtggttcttcgacttcaattgtctttaaatgtggcactttcgatacatgataatctcttttttgtaaatacgttttattatcatttactttgttatattctgtatctttatgatttgttttatatactttcattaagaatatgatgaataatgttactaagatgattaaaactatggttaatgttattatttctattctttttttcatttgctgcctcattacaatttaataaaaataattaactctacgctattttattaaattattattctttcaataaattatattatatattattttcactaaaatatcatctttaatatatcttactccgactattttttccatcattctttagcccgataaagtaagttttcaagcctgcttcattgtaaataaaagtttttaaacattatctttttatattaaaattaagttgtaattttagccaattagtaatacaatttatggctatgggagtaataattattattcttttatattaaaatggtatgattaaattattaacttatttttttaataaatacgtataggagcacataattatgaatcgttttttaaaatattttatgatgctattaacattattacttattgttgttcctgtcatttttattgtcaatttatatcatcattctgagaatgctttgcaatcttcatataataaatctgatgcaaaacgtcattctactttaagaaatagcaaaatgaatccttctaaaaacgctatctcaatattatttcttgggatagacgataatgaaggtagacgtaaaaatggtcaaacaactgaacattcaagaactgattcaatgattttagcaacacttaatcccaataaacagcaaatccgtttattaagtattcctcgtgatacaatcagttatattcctaaagtaggttattacgataaaatcacacacgcacatgcctatggaggtcctattgctgctatggatactgttgaagccacacttaatatccctgtcgactattatgttcgaattaatatggatgcctttgttcaagcggtagataaattaggtggtatttattacgatgtaccttatgatttagatgaacctaacacagatgatactggaagaatcaaggttaaaaaagggtatcacaaattaaatggtgatgaagctttggctgtagcacgcacgcgtcatcacgattcagatttaaaacgtggcgagagacaaatggatttaatcaaaattttatttcagaaagcaaaaaatttagattcatatgacagactagatgaactcgttcaaatagtaggtaaaaatgctaaacataacctaacaacagaagaaattaaatctatagcttcaatttatttatctgataatatagactttaaaaagtctcaacttaaaggtgacaatgattatttaaatggtatctactattataaccctagcattaagagtatattaaaatattcaaatttattgcgttctgatttaggactatctaaaataacagataagaatgatttattggatgaaagagtcattaattattatggcaatctagtaccgttaacacctattgattcgtttcttttagaaaataatcaaaaagataccacaacagatgaaaactctattcagagtaatggtactaacccttctacgcaatcacaatcagaacaaaatccatctgatagtactatggatcaacaaaatcaaatgagtaatcaagtcaatagcaacaattcagacaactcaaacgacttcaacaatcaaaatgaaataaatcaattatattaatttgagaggagtacgtagaatgtcacgcaaaacatatgaaaaaattgctaatattaacggcatgtttaacgtattagaacaacaaattattcatagtcaagacatggctttattcagaagtgaattcttttatgttaatcatgaacatcgtgaaaattatgaggcactattagtatactatggtgagaattcagtgaatccaattgtaaatggcgcttgttacattgttgctttacctgaaatttttaataaagtagatgtatttgaatctgatttacccttttcttgggtatatgatgaaaatggaattacggaaacaatgcaaagcattagtattcctttgcaatatttaattgcagccgctttagaggttacagacgttaatctttttaggccttcaggtttcactatggggatgaataactggaacatcgcacaattaaggatcttttggcaatattgcgcaattgttcgccaagaagcattataatttattactcctttttactttttagtaaaaggagtttttctttttctatatctaaataatataaaatgattgaatttatttaatttaagaaagtaggtaaatgccacatgtttaaagaagtaattaatcaatctatgctttctgattgttttgaaattagaaagtcagtttttgtagaagagcaaggggttccattagaaagcgaattagatatatttgaaaatacttctactcatattattggatattacaacgatcatccatttgcttgtgcacgatttcgtccatatgaagatggtataaaagtagaacgtgtagcaattttaaaaccttatcgcaataaagggttcggtaaaacattaatgaacacgattgaaagtattggaaaacaaaaacatcatcataaacttattttaaacgcacaactacaagctaaaccattctatgaaaaactaggttatattagtattggtcttccttttcaagaagaaaatattgctcatattaaaatgtataaaataatttaaatgatatttttcgatacttgaatttcaatgacaacagctagatatttataagaacaaaattaaatttagtttacaaatgagtaaaaaataattactcttacttttcttgacgttataataaaaaagtaaattaaaaaaggagcaactattatgtcgaaaaaatttagctttaaattcccatcaatgatcgcccttactttatttggtgcagcatttactacacatcatgctgaagcctctgaaaacaaacaaaacgctgctaataatgtaatcgatgatcaacaaaatattgaaaatgccaatgtagctaaacatcaagtcagtaatgcagcacaaaatatttctggagtgcaaacttaccaagaccctacattagtaaaatcaaatactactaataatacatataatacatacacatatgatgcaaaattagataacttaaatcaatcagcgtcatctcaaaataactcaacgcgttctaatactaatgatacagttaaaaacagtgatacaatatcaaattatcaatctgataatacaaaacataataataatgaagtagctactacctctactacttcaactgattcaactaaattagttacatcagaagattctaatcataaattaaattcaaatcgtataactactgaaacaccatcaactcataatgaaagcgctcaagtttcaaatacacataagttaaatacagatgagcctaaaacaacattaaataacgtagaaaatcaaaacaatagcatatcaaaagcgcaattaagcactactgtcgttaataataaacaacaaaaagtagaagataatgctacaacgacaaataatgacaataataaagtatcattatcttctactacagaaagtgacagtacgtctaaaaatttatcaaatacatcagataacactacagttaacaatgaagatactacgcttaaaaagaataatactcaaacttcaccaatgcataatactttaaaagtacgtgcatacagtacagctttaaataacactcatgttaataataaagctacaacttcaactcaatcaaatgatgcatctgtctctgactctacatcatcagttcataaaggtattggtggaaaaggtggtccagctacagtaagtacatattcaactacgtcttcactaccaaaatatgtaccgcaagttaaatcttcaattaataattatattcgcacaaataatttgaaagctccttcgattgaagaacattatacatcttacttccctaaatatggatatcgaaatggagtaggaaaacctgaaggcatcgtcgtgcatgatactgcaaatgacaattcaacgattgaaggcgaaattaattatatgagaaataattatacaaatgcgtttgtacatgcatttgtagatggaaaccgtattattgaaactgctcctactgattatttatcttggggagctggaccatatgggaataatcgttttattaatgttgaaatagttcatacacatgattatgcttcatttgcacgttcaatgaataactatgcagattacgctgctacacaattacaatattatggattaaaaccagatagtgctgaatatgatgctaaaggaacagtatggactcattatgctattagtcgttatcttggaggtacagatcacgctgatccacatgcctacttgagtaatcataattatagttatgatgaattatatgatttaattaacgaaaaatatttaattaaaatgggcaaagttgcaccatggggtacaacatctacaaataattcaactcctactactaaaccaagtataaataataaaaaattaacagtaacatctaataatggcttagctcaaattaaatcagataatagcggtctttatactactgtatatgattctaaggggaaaacgacgaatcaggttcataatactttagcagttacaaaatctgcacagcttgataaagacaaatattacctagtatccgattataatagtggaaaattatatggatgggttaaacaaaatgaaacgatttataatactattactcctaaagcgaaagtaaataaatcttatactattaaacctggaacgacactatacactgttccatggggtaattataatcaaattgctggaacagtatctaaatcaaatcaatctccatttaaagcgagtgcatcacaacaagtaggtaaatcaacatatgtatatggttcagtaaatggtttaactggttgggtaagtaaatattatttaaatgatgttcaaaacaaagcggatacaactaatatacttaatgtttctcaattaaataacactttaggacaagtagctaaaaaaaataatggtgcttacacaacagtatatgactcatctggaaaaataaatccttctattaacggtaatacttatcgtgtaactaaaaaagcgacattaaataacaaaaacttttatttgatttctgactttaatggtaatcaatcacacggttggattccttcatcagaaattaatattcaaactacaacacctataaatgatggtattaaaaaatacaatatcaaagggaatagtaatatatatgaaacaccttggggcagttcgtctcaaattaaagcaacagttccttcaaagggagatgttctaaaatcgatagacgctttaaaagtaggctcaaatacgtatcttcacggtgttattaataatgtttggggctggattttatcagacgatgttcaaactgtaaaaacgagtcaaaaaacaagtagtgttcaaactgtttcaaaaattgctcaagtaaattcaaccaatgatggtatacgttcaagtatttacgatgcaagtggtaagcatgcaaaacaatatgctaacaaaacatatgttgtaactaaagaaaaaaaattagatgatcatacatatgttttattatctagtacttctggaaatactccattaggttggtataatgttaaagacttaaatattaaaaatttagatgaagaacaaaaagtgaaaggtacttatactgtcaaccaaaataataatggcttatatacgattgcttggggcactaatcaacaacgattagataaaaacaacattgctaatcaaactttcaaggcttctaaatcgacaattgttgatggtaaaacgtatttatacggtacagttaataatcaaacaggttggattgcattaaaagatttaacaaacgcttcatctttcgatacagcagaagactataacgatgatttagttataactaatggtaatagtttttactatgacgaccctacttcagctaaagcgtactcactcaagccatttaatgaacaaatttttcaaattacaaaacgaaaagtagtaaatggtatcacttggtattatggtaaattaagtaatggtaaatcagtatggattaagaaaagcgatttacaacaacaattagttaaactatctaaaaactatagaacacttgatgaggtcactaaaattcaacacaatgtttacggtacaccaccacaagttcaacgtaataatagcggttggtcaaatgcaacgtatagtgaaattaaaaatgcgatgaacgcgaaaacacttgcaaaaaatccagctttaaaatatcaatttttacgtttagatcgtccacaattattatctgtagatcgtttaaatcgactacttaaaggtaagggaatgttagaaaaccaaggtcaagcatttgctaatgctgcaaaattgacaggtgttaatgaaatttacttaattgctcatgccttacttgaaacgggtaatggccaatctaaacttgctaaaggtgcaaatttggttaataatcaagtcgtttctaattcccctattaaatattataatgtatatggtattggagcttatgattatgcaccacttgtaaatggaattaattacgcaaaacaatctggctggaatagtatttctaaagctattattgatggagctaaatttattgctcaagattatattaaatctggtcaaaatacactttataaaatgcgttggaaccctgatcaacctggtacacatcaatatgctactgatattaattgggcaaatttgaatgctaaaagtttaaaatacttatatgatcaaattaattcagttggtaaatattttgaaataccagtatttaatcaataataatacttgggagttagactgaattcagtttcaattcagttatcgcctgcccatatgtaaaagaatctgagacacttatttctgtctcagattcttttttgctctaaattttatatttaatacaaacacccatcttattgtgctatgttataaagaacaataagatgggtgctatgttagatataaagatgacgactattaagtttatttaaaagatgattcaaattattgatttcctcttctgttaaacattgacatctcgcttcgattaattcacatcttgctatattgatttgtttaattaaatctctagcttcagttgttaaacataaatccttacaacgtaaatcttcatgtgactgttgacttgtaatataacctttatgaactaatttctttatccaacgagatacaatggattgctctctactaattttcattgttaaatcatattgtgataatcgatcatagttataaagaattcttaataattccagttggtcatttgttatatcagtccgttggccaaagcgtctatttactaaattaagatcattatttgttagggtaataagtttttctagttgattatacatagctgttctactccactctagtaattgtttatattataaagttaattttataattagacaatactattcaataaattgactaaattcattttaataatatggtattatctattcattatacacgatttctaatttttctatttaaattaagagaaagtgagattttattaattaaatattataaataaaaatatgatatgataattatattctatttcaaagtaatgaggtcataatactttgaatgattatatttagaggtgtaaatatgaaattaactttaaattcaaattctaagtttttaagagcgccaagtatccgacagttttcaagtcgaataaaaaatattgacgactgcgttaatttaactattggccaacctgattttccaatgcctgatgtggttaagcaagcatatattaatgcaataagcgaagataaaacaagttattcacataacaaaggccttactgaaacgcgtcaagcgattagtcaatattttaaacgtagatatggatttctttatagcgaagaagaaattattgttacaaacggtgcaagtgaagcgttagatacatcgctaagaagtataatcgaacctggagatgaaattttaatccctggtcctatttatgctggatatatcccattagttgaaactttaggtggtaaacctatttatattgataccacacattctgactttaaggtaacacctgagctaattgaagcttactttactgatcaaactaaagcaattttattaaattatcctactaatccaactggtgttatattagagcgctcagaagttgaagcccttgtacattatttaaaaactaaagaaatatttattatcagtgatgaaatctacgctgaaaatacgtttacaggaacacatacttcttttgcagaatatgaagagatacgtgatcaactattactcattggtggcttaagtaaatcgcattcagctacaggcatccgtatcggttttttaatcggtcctgaatatttaattgaaaaattaactttcatgcatgcatataactgtatttgtgctaatgttcctgctcaaattgcttgtatcactgcattaaatgagggcttagaagcaccaaaatatatgaacgaagcttatattgaacgacgtgattatttaaaagctaaattgttatcgctaggattcgaacttgaagctcaacctgaaggtgcattttatattttcccaagtattaaacgatttactaataatgattttgacttttgtgtcaatgtactggaagaggcacatgttgcgatggtaccaggatcttcttttacagatataggaaaaggctatattcgtatttcttatgcttatgaaatgaacgtcttaaaagaaggtatgcgccgtttagaattatatttaaaagaacactatcctaatgtgttagataattaaaaaaacgcaagattgactaagtcaattttgcgtttttttattactattgtttatgggaatttagggaattgatcaaaatcaggatcgcgtttttctttaaatgcgtcacgaccttcttttgcttcatcagtagtgtaatacagtaatgtagcatctccagccatttgttgtaaaccagctaaaccatctgtatctgcattcattgcagcttttaagaaacgtaatgctgttggtgaatgtttcataatatctttacaccaagcaactgtttcatcttctactttatctaaaggtactacagtattaactaagcccatttctaatgcctcttgagcattgtattgacgacataagtaccaaatttcacgtgcttttttgtggcctacgatacgagctaagtatcctgaaccataaccagcatcaaatgaccctactttaggtccagtttgaccaaagattgcattatctgcagcaattgttaagtcacatactacatttaatacgttacctccaccaattgcataacctctaaccattgcaataactggtttaggaataacacgaattaaacgttgtaaatccaatacatttaaacgaggaatttggtcttcaccaacataaccaccatgtccacgtttcttttgatctccgcctgaacaaaacgctttatcgccttcacctgttaagataataacagaaacattttgatcatcacgtgctctagtaaatgcatcaatcatttcagctactgttttaggtgtaaatgcattacgtacttctggacggttaattgttacttttgcaattccttcgaagaattcatatttaatttcatcatattcttttagtgtttcccactgtctagtcattttgctcctcctttaaaaaacctaatactattgtatcaaattctgcttcatcttccacatgaattgtgtgacctacatttttaaaaatatggatttgatagtttttaatttcttgtgccatttttttagcagtattaacgaatttttcatctaattctcctgctaaaataagacaatcactttttatacgcttaatatctccccataaattaggcatatgtccagtcccataatctcttaaagctttcgctaatttattgggattctgcgcaagtcgcatacgacgcattgccttttttttattatcatctaatagatattgtgtttgaaataaagggagtttttcccaatcatttacaaatacttcaattccagctatttctaatacacgtccacgtgcttgatcgatagcctgtcgttctttacgtaaagcttcgttagcaatgcctggtgatgtactttctaatattaattgtttgatttcatattgaccatgtatttcatagtagagtgctacgcgcccacccattgaatagcctaataaactgaatttatatttctcaaattgagataaaactcgatttatttgttccgttatatacggaaagtcccatatttgatctgtaggtgagtcatctttgccatgtccaggtaaatcaatagttaaaacattacattgagtaagaaacgcctctatatgattcatataagtttgactgtcactaataaaaccatgaagtaaaattaataattgattgcttggatgctcagacttataaaaattataatgtaacatttaaaatctcactcaatttcttatataaaagttgatgttgttctaagttatcttcacgatttgtaagaatttcgtatatatatgaattcatagttgaaaaagatacttgagaaaaatcggtaatattatttaaacgtttaaatgaaaagtcatataacatggcagtgtactcaaaatttagtccagttggtgtaccaaatagacgttcaaagtattgctctgctgctgttttttgaggcaaataagaaaatatccctccaccatcgttgttaagtataacaacattaatatgaatatcgtttaatttagccattaataatccattcatatcatgataaaaagctaaatctccaatcagtaatgtcacttttttatgtactgccatacctaaagcagtagaaataacaccatcaataccatttgcacctcgattagcatacacttctacttcactatcaaataataaattatctacatcacgaataggcatactattacttacaaataatgcatcatctttagtgagtttttgaatcagtgtacttacaaatgctgattcatctgtcgcttgagacatatgttgagtgattgctttacgagattgtgcttctattgactgccaacgttcaatccaatccttacggtttactgttggttcattcactaaacttctgaagaaatcatttgctgatatttcatatgagatgtgtggtggtgttggaaatacatcaattttatcattattttgaactaatatttgaaatgcatttgtgcgtgtaagccattgatttaattttttagaaataactggtttacctacacgtataataaaatcagcatcaatatttaaatgagaacggtataataaatcatatgttgtaatgacattaggatgattatacttacgtaattgactaagtggatctgcaagaattggtaagtcatgaattgtagcgtaagttaaaatttgatcgactgcttggtgctgcatgtcccctacaataatcaggcctttcttatcttttaatatattttttatatcttgtatatctatatttttttgataatgaggcaatattttatgttcagattttaaattctcagtcatttcaagatctggtgttaacggttctctaaatggcaaattaaaatgtattggaccacggtgtgggccatataaatattgacttgcaatttgcatttgataattaatagtattcagcatttcttgactgccatcagctacaggcatatcaaattggaagttaatataatttgcaaacatattgacttggttaatcgcttgtggtgcacctacacttctaagttcatgtggacgatcgctagtcaatactataagcggtatacggctgatttgactttcagctatagctggcgtgtaattagcagccgctgttccagaagtacataaaatcgcaactgggcgttcgctccctttaattaatcctaaggcaaaaaaagctgcgctacgttcatcaggatgtatccaagttttaatatttggatgcgcttcaaatgcaatcgctaaaggagtcgaacgtgagcccggactaataacgacttctcgcacaccataggcatataactctgatgcaaatgtataaacttgtttagttaaagcttctttatgattcattcttattcactactcctaaagcattcatcattggtgaaaatttcaccgacgtttcttcaacttcactttcagcattagaatcttttacaataccacaacctgcaaacaaagtagtttgattttgtttaattaacatagaacgaatagccacaataaattcacaatcatcatctacgtcaatatatccaactggagacccatataatcctcgtgtaccaaattcatttttttcaatatagtcaactgcttctttcttaggataaccccctaaggcaggtgtaggatgcaactcatcaattaaactaatatacgaatgattcaataatgttccttttatttcagtatacaaatgatacatatgatcattttttaaaatattaggtttttgattgtactctacattttctacataaggcttaatatcatttaaaatgcttctaacgacaaattgatgttcacctagatttttactgtcttgtagaaatgcttgaacatttttttcatctttttcagcatcttgtgttcgaggaattgttcctgctacagcctttgtagataatacaccgtcctcaacttttaataattgttctggtgtttgagaaaagaatacagattggttagactctaggataaataagtaactatttttctcattgtttaacgcacgattaagtacataaggaatactaattggcttatcaaacttaattaagcgacgtctcgcaagtactacttttttatctttatcaagttgttcaatcgtatgacttacaagatctttccattcatcaacataaatatcttccatgcgtgttacattgcctaaagctgtctctcgttctgtcgtatcaacttgagcattttcgaaataattaatcatttgatttaatttttccatttcaaattgagctttttcaactgtatatgtcaaaatggtttgattgttaactgaagaaataagtacttcaggtaccacaaaatgattaatcccaaattcacgccactcatcatcagatttatgatttgaaaattggaatccccctactattttaaggtgatgcttttgcgtattaacatgaattagttctacatcatttttaaatttttcccattcccgaaagatagattgtttattttcaaagttattcttaaatctttgaattgcatgatagccgaaaaatgaagacatattatcgtttaatcgcaaataaaatcgatctccagcttgtttttcagttaaattaaataattcacttggtgttaaagatttatttaacacgacttcaacagaaacccagtttttattgctttcatatatagattccaaaattttgtcttccattaggttagcagccattcatttcacttctttcattatcttttttttactcattaaaatattgtaacatttttcgttattcatcgtattataattgcttaatcaatttagagaaatatttcacgttgattgacctttcttacctattcctttaaaatacatatgttaaaactttatattataagaggtagattatattatggcagatcaatatcaacaatattcaactgttagaaaatattggcatttaatgagacctcatactttaaccgcgtctattgtccctgtattagtaggaacagcgacagctaaacttttcttactgggcagtcaagatcatattaaattcagcctatttttagcaatgttaatcgcatgtcttttaattcaagcagcgactaatatgtttaatgaatattatgattttaaaaaaggattagacgatcatacatctgtaggtatcggtggcgcgattgttcgaaatggtatgagtccaaaacttgtcatgaatctagcaattgctttttatattattgccgctttacttggtatatatctagctgctaatagttcattttggattattccagttggtattgtatgtatggcaattggttatttatatactggtggacctattcctatttcatggacgccatttggtgaattattctccggattatttatgggtatgattatcattttacttgcattctttattcaaacaggtaatgtcaatggttttgttgtttggattagcttacctattgttattacaatcgggttaattaatatggctaataacattcgtgaccgtgttaaagataaagcaagtggtcgtaaaaccttacctattttattaggtaaaaaagcttctattacgtttatggcagcaatgtatatcttagcttacttaatcgtaatatttactgctttattcaaatcaggcggctcattattctacttgttagtattattctcattcccaatgccaatcaaagcaattcgtcgttttaataaaaatgatacaccagcaagcatgatgccagcgatggcagcgactggcaaaacgaatacagtctttggtattttgtacgctttgggtatttatatcagcgcacttttaggtggaatctaatttattttaactagcattgttttttaacaatgctagtttttttattattatatatatatcatatgtagataatcatggccatataaattaatatcttcaacccatttgaaacctagttgtttataaagtttaagtgctttctcattattataatcacaatttaaactccattttttattagaacttgtggtgatcaaatgttccaacaattgtgtcgcaataccttgtcctctataatcaggcgatgtgaccactgcttcaatataccactcatcatttttagcttcttttataggtaaaggtgttccaactaatctgatatcttcttcaagaggcagttggttccattgttcttcgtactccatttcttttgaaccatcataagcgataatacaaccggccaattcattattcttttcatatacccatatatttttataataggtacgataatgtacattaactatactaagttcaagcaaattgatcatacgttttttagaaatttcctttacaatgtcaagttccatatctttccatattaaataataaagttttgcaatttgcttattatcactcggtgtcgcttttctaatcatatttatccctccatctacatcatactcatattattacaagaaattaaatattatagtaagtataaactgattcttttataagtgccgttcttgattttagtcataaattacttacaatatgaaaataaggaggcatccataatatgagagtaaacaaaacattgtatgtattatgcgcattgttcttaggtggtgttgggattcacaagttctatgcggataaagttggacaaggcgtattacatttggtctttttttggacacttattccaacaattatttcgattattcatggcataatcattatcttcactactacagctgataataatggatatatttttatacccagataaaaaacaaccaaaagtatttaaactttcttctttaaattaaagaaaatggggtataaattaataatagttttaaaaaggagaatgtgactatgaaaaactttattaaacgtattgtgagaacaattattacaggatatgtattaaaatggattaaaaataaaatagaaggaaattcaaaaagaaaataatttaaaaaggtctattcactttattttagagaatagacctttttataatgactcattggaaccggatttactcattgagaaatgcctccaaatgttttaattcagtagtatattgattaaaatcatcttcatttctattaaccaaggcttcatcaattaatgttacaagttgtttctttctttctaaacgtaaagcttcgtcaatcacaagttctacacctaaatcattcatcgtcgttacaaattcttctagtgtggtatgtttaacatttgtattgtaatacataaaattcactacctttctattaatttaaaaatagtatacaagctttttattttgaaatcaatgaatattcagacttttctaaataaaatagtgtaattttattttcaaataataacttgacaacatatactttttttatataataattttatattattaatcactcttcgtttttaataataaataattaaataaggagctgatcttatgactcagttcaataaaccacctaatacgatttatgtcatacgtaaaggtgatatggtgattagacctacatttgacaatcatcaacaaccgaacggctcagaaatcctcaaattcgatacctcacgagaaataagcctttttaaaactcaaaaaattattgaacgatcatgtagattttatggcaataactacttaagcaagaaagctgaaactcaacgcatcgctggaataactagtaaacctcccatccttctcacaccattgtttccaacttactttttcccaacacattcagaccgtttagaagaaaatatatggattaatatgcattatatttctgatattaagccattaaagaacagaaagagtaaaattatctttgcaaaccaagaagcactaacattaaatgtatcttttcatagtttatggcatcaatattctaattctattttctattactatatgattgataaacaagcaagaatgaagtctaataatccagatatgccaatcgattatgaaaaaacatctttaaatatttttgaggccctttcacactattctttattagaagataaatagctgtatgtttatttttaaaatatacggaacgattatattaatttagtgtaaatgttccgtatattttttaaagattatctcttgcaaattttaatattattgatataattgtatttgtgttgattaaagaacacgttatattattccgcagtagctcagtggtagagctatcggctgttaaccgatcggtcgtaggttcgaatcctacctgcggagccatatggaaacgtactcaagttggctgaagaggcgcccctgctaagggtgtaggtcgcgagagcggcgcgagggttcgaatccctccgtttccgtcatttaactctttactttttaagtaaagagtttttttatataaaaaaagagccattgtttctacaatttgactcctcttttatattgaaactaatacgccattaatttcaatatactgtctttatcaatatcaccaaagtaatgataaaagtcatagtcttccattacttcttttatatgagtataatcgtgtaatgttcctactaaagcatcttctaattcattgacatttccttctccaaagaaatcgccaaagattttagcatgttcaatttttccttttttgacatcaaatttaacttgaatgaatcctttttcaaacttctcgtcccgttcaaaattatatttaggatttttaccataattccaatcccaagtacgatatttttcattgcttaattgcttaatattgttccaatcttctttcgttaaatgatattcctctacttcatgctcaccaaagatggtttttaaaataatttgcttaaattgatcaattgtaatagagtcatctaaaaattcttcaatatttgctacgcgtttacgtacagacttcacacctttagattgaatttttttagggttcacttttaaagcgttttgtacttcttctaaatcgctatttagcattaatgtaccatgactaaacatacgatttttaaccttaaccatagcatttccggaaattttagctgcgcctacttgaatgtcattacggcctgtcatttctgcatctacacccatagattgtaaagcttgaacaataggctcagtgaatttcttaaagttatgaaaactgttaccatcatcactcgttacaaagctaaaattcaaatttcctttatcatgatacacagctcctcctccagaaattcgtcgtacaacatgaatatgatgatcatctatatactgtttattaacttcttcaattgtattttgatttttacctacaatgattgagggttcattaacataaaataaaaagtaactatcatctgcaggtaaatgtttaagtacatattcttccatagctaggttaattgtagggtcagtaatattattattacttacaaatttcatagtactcacctttctctttcttttaaaatttaataatgcaatacatcatccattatcgattgtttaacttaattatggcattattttcaaaaataatataatattttctaattttagtatatatttgtttatttgtagtgtaaattttagtacaatatagtctagctatgatttgaggaggactcgaaatgactgttgcagaagttggaaatattgtagaattttatgacggtttaagaggccgtgttgaaaaaattaatgataattcagttattgttgatttgacaattatggaaaattttaatgaactagatttacctgaaaaaacagttattaatcacaaacgatataaaatcgttgaataagaaggttaatattaaatgaaaaatacatctaaacccttaatttggtttgttgcaagttttattgtatttcatctcatcttatttataatgtggggagaacatcaagaatattggtatttatatactggtataatgttaattgctggcattagttatgtattttatcaacgggatatcacatcaaaacgtctattaacctctattggtgtgggagtaatcacaggtgttgtattagtgataatacaacttatattttcacttatatcgtcacaaattacttataccgaattaattaaagaattatcaagaacgggtgtatattttaaatggcaaatgttaattactatcttatttgtcattccttgtcatgagttatacatgcgtgctgtcttacaaaaagagttaaataaattcagactacctcgctggataacaattttaatacctgcattatgttctagttctttatttatctatcttgataaatggtggattgttatttttatctttatagctcaagtcatattatcattgagttatcagtatacaagacgtattgttacatcgtctttaggtcaaattgttgccatcattttattacttatttttcatggataaaaaccttttcttagttgctaaaactaagaaaaggttttttgattggtatcacgattcatttcaataacgatattactttttcatttaaaacataactatctatatacaaaaaagagtgggataacgaattcaaaatgaatgtatcccactttcctttctctgtttatccaatttgaattctttcttttggataactaaatttatcaggttctttacgcccagatatcataataataaatgatattaaaccgacacgtcctataaacataagaagcattaagactaccttagtaatactgctaatattatctgtcaccccaagtgataggccacatgttccaaatgcagacatgacttcaaaaaatacctgtaagaatgataaattattggcttctgctgctaatataataatgatacttacaaaagtaagtactgtcgccattataaacacagcaaaagaacgctgtatatcgatggtatgaatttctctattaaatactttaatcgatgatttttctgtattgttattaaaattaatcacaaataaaataagtatcgcaaatgtcgttgttcgaatacctcctcctactgaactcggagaagatccaataaacatgagaatactcataatgacatttgttgcatcactaaagtatgtcacatcaatggtttgtaatccagcactacgtgtagttgcagattgaaataatgcatagaataaagattgatgccaattatatcctttgaatgcatgattgtactcaagtgctaaaatagataaaaatccagatataaataagaaaaagtaagtagttgttgtaattttagtaaataaagaaaatctaaaatgacttactctatttcgtatataagctctgatttcaagtaatactggaaaaccaattgatccaagaataattaaaaacattacaatagtttgtacaaagtaatccttggcatatggaactagcgattgaccagtaatatctaacccaccatttgtagtagctgaaatagatacaaacaaaccttgcattaaagcatttttcaaatcaggattgtctctgtaaaaataaaatgcaagcaagagtgcacctacaatttcgatagtcatgattgttttaacaatttcaataataagcttaactgtcccactcattgtgtctttattattatcaagcataataagttgacgttcgcgcataccaatgtgtttaccaagtactacccacaacactgtacctatcgccattacgcctatgccaccgatgtttaagataattaaaatgataagttggccaaatgatgaataggtatcaataatactgactggcgttaaaccggtcacactaattccagatacagctacaaacaacgtatctataggacttaccttcacgccaggtttatgtacaaaaggtaaattgagtaataaaaatgcaacgacaattgcaattaaataatataaaacaataccttgttgaggcgttgattttttgaataatttactgaaaatagacattagtttgtcacctcaatgtcatttcaaattaatttctatatcttgaatatttccatctctgtaaattttagccgataacgtttttaaatcttgtcgatggttaaacaggatgtgtctatactgcaaattatcttttaatgttttaccttctaattttacaatgacatcaccaatttttaaacctgattttttacctaaaccgccatcttttaattttttcactaaaatcccatcatttatatcattaggtaattttaaaagtgagcgttcataatgatttaaatcattcacattttctaaagctattccagtattgggataatttactttcccatttttttcaagctctttagcaattgatttagcttcattaatgggaatagcaaaacccattccttctatacttggcatattaatttttaatgagacgataccaataagctccccatctttattaactacagctccacctgaatgtcctggattaacggaagcatcaatttgaaacgtttgcatcaattcatcatttttattatctttatcaaaatcaacaggaaccaatcgatttaaccctgaaataatccctttagataccgtatttctaaactcttctcctagaggattacctacaattaatatcgattcccctaaaactaatttatttgaatttccaatatggataggtttaatatttttattattgatttttgcttttactactgcaatatctgaccatttatcttttccgacaacgtcaccttttatacttttattctctccatatgtaatcttaactttatccgcttcaccaacaatatgcgtatttgttaatacaaaaaaagtatcgcctacagttttgtagacgacacctgagccaagttcattatctgattttgaatttgttgtttgaactgaaatattcttaggtgcgtcactttctactgttaccactgatctgacagtattattagcgtttttcatagttgttgtgtacttcttatcttgtgtatgtgtttgatttgaatgttgctcttgagaaggttcagtaaaaatagcttttactaaaactaagattaatattaaagcaattgcgattaaaattttaatccaatgttcttttaaaaagtcaacgatcttattttgtgtatcatttgctgattgttcatgtgattcatgaggttgttgatccgatatattttctgtcgtattcttatcagaattagatatgtgctttgattgttcactcttagtatgttctacttgagttgaatgttgctgagttgacatttgttctttctcagtatcgattgattctttatccttagttgaagtgtatgattcttcagttattgttggatgtttagattgtgttttaattgtatcattatgctgattgtctttttcttttttagacttttgacgagattcattatttttattcaatctactataagttggttctatagatttattcgtttcattttcactttttgagccattactcgaaattggtttttgctgtttcaatttctcattatgtatgtcttcttgtttaagatgttgttcttcaggcagagttaaatgatgcctattatttttcttagctgtttttgatgcatctctttttgatcttaacttagctaaatgttgttgttgttgaatttcttcttgtgttaatttctcaattctagcttttcttaaattatctttgacacgttcttcatttacttttgcttgatgctgttctttttccgctaaatgttcacgcttttgtctttcacgttcaatacgttcctcgcgttcttcattatgaaagtattcgtgacgtttacgcccatatttactacgcggtatcacttgttttttatcattatccaaagatgcccactcctaaccttgaaatcacaatatatatcactaaaaaaatgatttacttttatgtggttatatatctatctgaattaatttatatattacttaaattttaatatcattagtgttaataagcaaacgattgtcaaatattttctaaaaatattatacgaatagttattaattgaaaaaaccttttgaagtctcttataaaaaacttcaaaaggtatcgattatatctaatgcttagcattctttttattttttcgtactgatgttaaccatccaatcacaactaataaaatcattacagtccagaagattgcttgccataacgtactatgtgggaaatcttctgataatacgccaatatctggatgagctaatacgataactactaatttaatacctacccagccaacaattgcgaaagcggcaccttctaaacctggatatttatttaataaatcaacaaaccatgttgctgcaaaacgcattaaaataacaccaatcatacccccgatgaacatgactccaaattgacctaaatccattccgccaaaatgaatacccatcttaggaagtgtcactgcaatagccattgctgctaacatagaatcaattgcaaaggcaatgtcagcaaactctactttaaatacggtagcccaaaattttccagcacttactttcttttcagcgccagtttcatcataatgatgttcatccccaacttgttcctcttcatctttcttatggaagaaattccaaagatttctaatagacatgaaaattaagtatgcagcaccaatcgcttgaataaaccagaaattcacaataatactaattaaaaataaagcaataaaacggaaaataaatgctcctagtaaaccatagaataatgcttttttacgctgcgctggtggtaaatgcttaaccattactgccattacaaccgcgttatctgctgctagtaatccttctaaaaatactaacactaatattacccacaaataaggtaaaattaagcttggatccatgaaaagacagctcctttatttattttttacaaataaaaagacctatgctaattcatagcaaaggtctcacttagcaaatttgctcattttaccggaagtatcaacttcgtaatgacgataaaatgctgaatttaagatgttagtaatatagcccctcaaattctcaagttactcccctctgacattaagtcataggtatttatttgttaagagtattataaccagatttggtatatataaacaatgttaaagctaaaaatattgtatctctttattattattttaaattaaaccttatattgtcattttttataataaactatatagtttaatatctgggaatttttcttcaaaccaacgtgtagcaaattcattttcaaataagaaaacaaacttatcatatctgtctttcactaaaatagaacgtgacgtgttcatcttatcttgaatatcctcttcattttcaatccaacgtgcaatttttctacctacaggttccatgacgacatcgacattgtattcatttttcattctgtgctcgaatacttcaaattgtaattgacccactgcaccgagaataatttgattcgtatgaagtgttttataatattgaatcgcaccttcttgcacaagctgttcaattcccttatggaaatgtttttgtttcataacatttttagcagagactttcatgaaaatttcaggtgtaaattgtggtaaatcttggaaattaaatttttgtttacctccaactaatgtatcaccaatttggtagttacctgtatcgtataatccaataatatctccagctacagcgtgattgacggtttctttatcatctgccataaaagaggtagagcgtgtgattttttgttttttattggtacgttgcaaggtcacatccatacctctttcaaacgcgccactgactactctcataaaagcaattctatctctatgttttggatccatattcgcttgaattttaaatataaaacccgagaactcgtcatcaaacgggctaacttcaacttcttcattcgtctgacgagcattaggcataggcgcataatctacatatgcattcaagaaattctgaaccccgaaattagccaatgctgagccaaaaaatacaggagttaaatcgccatttaataatgctccattgtcaaatttttcgccagcttcttcaactaacataaattcttcaatcgcttgttcgaaagcactatcattgccaatggtgtgttcttcttcaagttcatactcatcatttaaatgtaatatgttctcttcatctctaaaaggttcaatagttttagtctcacgatcaataataccaaaaaagttttgtcccattcctattggccaattcattgggtatgtgtcaatatttaacgtttcttctatttcttctaatagttcaaatggctctttacctacacggtctaatttgttgataaaagtaaagataggaatgcctctcattttacatactttaaataattttaatgtttggggttcgatcccttttgcacaatcgataaccattactgcactgtcaaccgccattaatgttcggtatgtatcttcagaaaaatcttcgtgtcctggtgtatctagaatattaattttataatcatcataatcaaactgcatgactgaactggttacagaaataccacgttcttgttctactttcatccagtcactggttgcaaatttccctgttttttttccttttacagtacccgcttcacgaatagcaccactaaaatataataatttttcagttagcgtcgttttaccagcatccgggtgtgaaataatagcaaacgtttttcttgattctatttcttcttttaaactcattcattattctcctttaaatcctttattatccacttagataactgagaagctatacgcaatgcttcactttcttctttaaatgtaaataattgcattattaactcttcatttatttcctgttcattgagttgtgcatttaattctacagaccaaaacatatctggaatagctatcatataataagaatgatgcacgtgttcatatagatagacattgattatttcattttgttcagaaagttgcttaatgatcatagttggattttccaaactttttatacgcagcttctaaaccaattaaatcgtcacgatgtggcactttcacgtgtcctggcataatttgataaggttctctacctttagaagcaagtacaactgtatcacctggattcgcgacttcgatagcatgtttaataccttcagctcgatcttcaaattctatatagttattatgtgttgcacctttagcaagttctgcagtcaacattttaggatcgtcatctgctggattgtcaggtgtaaaaatcacatagtctgctcgacatgcaacagcccccatttcaggcgtttttgttaaatcacgttcgccagccatgcctactaaaaagatgagcttttgtttaacaaaaggttgcactgcatcaatcagtttattcataccatcagcagtatgtgcataatcaataattaaatcgattggaagtgatggatctaaaacctctagacgcccttcaacaggttctaaagatttcaccacttctacgatatctttgaaatcgattcctttactccacactgctatcatagctgccataagatttgagatattaaatttacctacatatggtgatgaaacatggtacgtgccaaatggagtagcaaaatcaaattgtgcaccttgtaaagattctttgatattttgagccataaactgtgcttcattatctataccatatgtcaatatttcataaggtgttactgtttctaaatatttagagaaatcatcatcattatttaacaccacatacttttcttttgataaatcttcacctaattgactaaatagtaatgatttagcatgtccataagcttccattgtgccatgaaagtctaaatgatcttgggttaaatttgaaaaaacagctacatcaaattctacccctcttaatcgtcctagagctaatccatgacttgagacttccatagtcattgcttcagctttactgtctacagcttgcttaattttcttagtaagcaatacagtttcaggagtagtatttgccccctttgttttttcttcattaatttgaaatccattcgtacctaaatatgcactatttttgtctaatcccctgtaaattaagtgaatcatcgtcgcgattgaagttttaccatttgtaccagtgaccccaaaggtagtgagttgttgacttggataatcaaataatgtatgcgctaatatactggctactcttaaagtatcaggtacaataacttgtgttacttctcctttaacttcttgcttacggtttacaactataattttagttccttggtcaatgacattttgacaaaatctatgactatctacggtatatcctttggaagctacaaagatactttctccactagcagttcgtgaatctgtagtaatatcagtgatatctatatctaaagttcctataacttgtttaactcttattttattgaacaactcattcgcattcaaaatgtatcgctcctttttttcaatatctctattatacacattttaaagttgttgataaatttattctcacctaaaaaagtaaattctgaactacttaaaatcaaataacttttgtatgttctgtattattaatattaattctaagttaattatttataaattttttcttatcttagtgtaagcctcctacatttcactttattagtgctaggataagggtataaagttaaagtaatcattgttcgaatatgctataattcactataaatgaattttatgacttccttgaatgaaatacatattctttatactagtatgtattttttactgtaatacatcattcgatggattaaacttaaattattggagggtgactattaatggttactcaaaataaaaagatattgattatcactggatcatttggaaacggtcatttacaagtgacacaaagtattgtcaatcaattgaatgacatgaatctacctcatatttctgttattgagcatgatttatttatggaagcacatcccatccttacgtctatttgtaaaaaatggtatatcaatagctttaaatattttagaaatatgtataaaaacttttattatagtcgaccagatgaattagataaatgtttttataaatactatggtttaaataaactgattaacctacttttaaaagaaaagcctgacttgattttaatgacttttccaacgcccgtgatgtcagtattaactgaacaatttaacatgcgtatccctattgcaacagtcatgacggattatcgtctacaaaaaaactggattactccaaattctcatagatattatgtagctactaaagatacaaaagaagacttcgtaaacgttggtgtaccggcatctttaattaaagtcacgggtatccctatttctgataaatttgaagcggatattgatcaacaggcttggctaaaaaaatatcatttagatcctaaaaaaaatactatccttatgtctgcaggtgcttttggagtatcaaaaggttttgaacatatgatagaacgtatcttagaaaaaagtcctcattctcaagtcgttatgatttgtggtagaagtaaaggacttaaacgtaatttggaagccagatttaaatcttacgacaacgttctcattttaggatatacaaaacatatgaatgaatggatggcttcaagtcaattaatgattactaaaccaggtgggattacgatatccgaaggtttgacaagaagtatcccaatgattttcttaaatcctgctccaggacaagaactagaaaatgcgtattatttccaagaaaaagggtatggtagaattgctaatactcctgaagatgcaattgatattgtctctgaattaacacatgattcgaacaaattaactctaatgataaatacaatgcgtcaggatagagtagattattcaactcatcgactttgtatcgatttattgaatatgctcaatcattcatctcaacagcaagaaatttatggaaaggtgccattatatgctaagttctttgtcaaacaataaaagcataagtaaaaattttaaaataatgctcgttattttatttttaatggaatttgctaggggaatgtatgtattaagttatgttaactatttacctactgtaacctctatcgctgtagctgtgacttcagcagcgttatctattcattttatttcagatgcagctacaaactttgtgattggttttttattaaagaaatttgggactaaaattgtccttaatttaggttttttattagcttttttaagcttgtttctaattattttctttccagctaatcctatcattatcattattagtgcaattatgctaggaattgcagtcagtccaatatgggtaatcatgttatctagtgtggaagaaagtcaacgtggcaaacaaatgggttatgtatattttgcatggttattaggtttgcttgtaggctgggcgtttatgaatgttctagtcaaaatacatccaacgcgttttgcattcacgatgtctcttgtcgtcattattgcatggatactttattattttgtagatgtaaaactcacaaattacgatactaaacctgtaaaagaacaattaggtcaaatcgtagaagtaatgaagcgtcatatgattttattcccaggtattttgttgcaaggtgcttcaatatcagctttgcttccaatattgccgacgtatgctacaaaagttgtgggggtaacaactattgaatatactgttgctatcgctattggtggtattggttgtgcaatatcaatgttatttttatctaaaataatcgataaaaatagcactggctttatgtatgccgttatttttgtaggattcatattgtttacgctatttatttttggtctctcactagttaacaatattattgttgtatggatagttgccgcctttataggtttaatgtatggcattttattacctgcttggaatacttttatggctggacatatcgatccgtctgaacaagaagaaacttggggtgtatttaatagtgtccaaggctttggttcaatgattggtcctcttttcggaggccttatcgctcaattctcaaatggattaaataatacattctatgtctcagctttcatttttctattactcgctattttttatggcatttattttatcaaaagtaaaaagcatcaaaaatattcttaaaaaaagaagtcaaaacattttagttttgacttcttttttatatacatatcatgctagtttaaaactatcaacaatgttccatctatcttcatcttcattgtaatgtaacaatgaaagttcatcgatggtttctctatggtctactcctgcaagcttcacttgaccaaatatatcttcaaattcttgactcgttaaaccttgagcaatcgtaaaatgaggaacgaatggatgttcagctttaccataaaatgattcggtattaaatgtattaaataaattttctaattcttctgttttttcaactttaaaataaataacattatttgtcggtttaaagcttgaagcttttgtcacgtggacctctacaggtttaaatccatctaatttttgtttaacttcgtctttaaatgaatctaattctgtttctttaagttcaaagtgaggtttaatcgtaatatgtggcataatacgtgcatactccgtatcataacgcttacgatagccatctacttcattttgaaatgattgtgccggaataagtgctaatcctatcttcattgaaattcctcctttgtttaacatacttctattatatcaaaattctatttaatacgttattagatacaacgtttttttgaaaaggctttcaaaaaagatatgtagactattcatatgtactatgattattatttaaaaaataatagagaatatctccgatcataggtttccatgatttccaattatgactaccattaaattcattgtagacgtaagtgacacactcatcttgttcaataaggtttgatagctttctatttggagttaaaaaatcagcttgctcaccagtcgttggtaatttaaaatcgacttcatctctaccaatcgcatgccaaattgttaatcgattacgttgcttacatgtctcaaatttttcaagaacagtatgatctgagtgcggactaaacatagctatttgactaaatattgaaggataagtcaatgaagtaagaaaggcaatacttccagctaaactatctcctattaataatctagaatttcccactttatatgtaggaaacgtttgatcaatgaaaggtaaaagttctttaactactgactgaatcgtcttttcactacgactaccttgaggatgaaactcttctctacgtttctcaacatcttcataatgaaatccaacaataatagcacgttcaatacgttcttcttttcttagacgttcatattcacgctgaatccttccaaatcggaaaaagtccaatccatcaaaacaaataatcacctgagacttaaataattcagtaaaatcttctggaagataaatcgacaatgtgatatctctttctagaattttactatttaaaatatatttattaatttttccagctttaaattcttccatattatcctctctccttcatatatattcatattgtatcaattttatttattagtgacagtgatataaacgtttataataagcttttttattttagattctatatacttttttaagagaattaggaattgtttaattaagctcatatatttttatacaattaaatattataatataattattttttagttaataaatttttcctttttaacatctcttatttaagatatacttattactaatgaattgattactttaggaggaagtaagtctatgcttaataaagtatggtttcgaactggaattttcttaatcatcctgttcgtacttataaagttatttatggaagtgcatagtgtatttacacctatagcaactattataggttcagtgtttcttccattcttattaagtggatttttattttatatctgcttaccttttcaaacacttttggaaaaatggggtttcccacgttgggcaagtattttaactatctttatcgtattaatcgctattatcgctatcgtagtagctttcattgctcctattattatttctaatgttaataatttaatcaaagcaacaccaactttacaacgtgatgcagaacaagtggttaatttctcattaaatcaaatggataaattaccaagtgatgtaacagcgaaaattaattcagcaatgaaatcaatcagtgatagtttaactggtatattagcaaattcaatcacttatatcacatctcttatttcaaccattttcttattgattatggtaccgttcttcttgatttatatgttaaaagatcatgaaaaatttattccagcaattggtaaatttttcaaaggagaacgtaaagtttttgttgttgatttacttaaagatttaaattataccttaaaatcgtatattcaaggtcaagttactgttagtttcatcttaggtgttattctttatattggttatagccttattgggttaccttatacaccattgcttgtattattcgctggtgtagcaaacttaatcccatttttaggaccttggttatcatttgcgcctgctgcaatattagggattatcgatggtccatcaacatttatttgggtctgtgttgttacattaattgcacaacaacttgaaggtaatgtcatcacacctaacgtcatgggtaaatcactaagtattcatccacttacaatcattgttgttatcttagcagcgggtgatttaggaggattcacacttattttaattgctgttccactttatgcagtattaaaaacaatagcaagaaatgtatttaagtatcgtcaacgtatcattgataaagcaaatagcgatgttaaagattaaattaattattaatgctttttaattacttattgcggatagaacatattctattcgcagttttttttatgtcatatcacattgaataatataaagctagaagagggataaaattcatttttaagtcgctgttccacatcatcaatgcctccccaatttgcgttgaatgtagatgttcttattgaaagtttctatgttctagccttggaactgaaattgaataaagcttgatacaaatgtattttcaattcagtgatcaactgtcgatttataaaaaaagtctaagacaactcattgtctcagactcttagatttatcatatatcttataactatttttcaatttaaacttatttaattgcgtggaaaccactatctacgtggatattttctccagttacaccacttgaaaaatcacttaataaataagcagcagttttacccacttcttcttgatctacattacgtcttaacggtgcacgttcttcaacttctttaagaattaaattcaatccacctacacctttagcacttaatgtacgaattggtccagcagaaattgcattgactcgaatattatctgggcctaaatcatatgctaaatatttaacatttgcttcaagacttgcttttgctacacccatcacattatagttttgaattgcaaattctccgcctaaataagttgtagctacaatactaccaccattcggcataatttttttcgcttcatgagctacaattgttaatgaatatgaactaatatcttgtgcaagtaggaatccttcacgagatgtttcagaaaaacgaccacgtaaatcttccatattagcaaatgcaattgaatgatagacgccatcaatatttccaacttcttcaccgattttcgcaaagccattaatgacatcttcatctttttgaacatctatttgataaagatgatgctctttttgatttaattgatctaataatttttctaattcttttttactacgttctttacgatatgtaaatacgagatgcgcgcctaattcgtctaatactttagctacgccaaaaccaatactacgtttgttagcgatacccataatgacaaaggttttattttctaaattaatcatataaattatctccttatattactttatattaatccgttcattataaacgtttttaacatacatattttaccattgttaataatatttaataaagtaataataaattttcaaatcatctcaataaaaagagaggtacacaaagtaatgtatctttttatgttatttttcaaagataccctttattttgtcctctcttttaaatggattaataataaaattctaattcagatttgagttcatctacatattctttagaacctgttacaattaaacggtctttatatctaagttgcgtatctccatgtggtacaatggattcattatttctaacaatacgtacaaatatgatatccccaccaaatgggaaatgacgtaatagaatattttcatatttataattcaacatttcaatttcatatagtgacgtttcaacgttacttaaaatatttagcatatttggtgtttcaattaaaccttttaagaaaattttattactaataaagttactaaatacttcaataccatctgtttttaattcttcatcatcaccactattttctagtcgacaaataactctgtttacaccatgagatttagctaattttgctatccttttatttaaaccatcatcattagcagaacacacgacaatatcttgattaaacaagccaagtctctctaataaactttcttcatattcactaatttcaatgacagtcacgttgtcaggtaaatttcgcttatcacttaaatctttacggtaaaacaacgttatattatataactgtgaagtcagattttgaacaattggaatagtcaattgatttttaccaattaacgcaatatcaatttttcggttcacttcatctggaattgggaataattttttaaatacaacaggtacaaatacacatgtaataattgcacttaatattaatatccctgacatttcagaagtaattgcttttaattcttcagcaatttttgctgcagcaataacaagcgaaagtgtagatgttaataaaaatgctgatgcaatggttgttttagtatcaaaccatcttcgaataaataagacaggaatcaacttagaaacgataaaggacaatataagtatcggaattataataagtaaagaaggttctttaattaaagatggtatatctaaatctacaccgaccataataaagaatatcggtataaagaatccgtatccaaatgaatctaaagtatgaatgatttcttcatcaggttttaacagtgatacaactacaccagctaaaaaagcacctaatatatattcagcaccaaccccctcagcaagagcaacgagtaaaatgattaatgcaaaaatggcccgtatgtcaatttgtgttgtaccacccattaagcgttgcataaaatttaaccgtttaaatacagaacctaataaataaaatattgcagtaaacacgattaaaattgcagatagccaaattgaccctccgccttcaccattgattccaccataaatagttaataaaaccatcgtaaataaatctgctaatactgctactaataatataaattgtcctattgttgtacgcatgatattcatttctttaagtgttggcacgactacacccaatgaaatggttgaaataataatgaccattaataatacatcatctacaaagcctaaccatttaaatgcaaatgctaaaatgattgaaagcaccattattaacgaaaaaactgtaagtgctaattgtaaatgactgggtaaattcttttcatttttattaataccctgtctctttcttgtgtcttttttaaatgcgctaaaatcaatttccagtccacttaaaaacattaaaaagataaaacctaatgttgaaagaatgtttaacatttcatctttgtggacaagtcctaaaaatgagtttcctataataattcccattaatatttcagctacgacaacaggtaaaaaagtgacgtttaatcgattaacaataatcggtgtaagaaatgctgcgacgacgactatgaccaaagaaaaaaatcccatttcatccccctatgttagatatgacataaatgttgttgcaaggccaaaataaattaacatacttacaatatcattgatagttgtaataaatggtccgcttgcgacagcaggatcgatatgaattttattcattaagattggaatcattgagcctactaacgtacctactgtcatggcaatagttaaacttgcacctacaatcagtgccaagaagggttgacgataaataatgacaataattaagaataaaatcactgcacacacaaaaccagtgattaacccactgcctgcttcttttaaagctattttaagtttacttttttctttaatatcaccattagaaatattacgaacagacactgctaatgattgcgttcctgaatttcctgacatcccacttataatagggataaatgctgctaataatgcaacttgcgacaatgtatcttcaaaaccacccagaatcgttgctgttatcatacctaaaaatgttaaaataatcagccacggtaatctcttcaatgctttcttaaatactgattgatcagtagatttagtatcagaaacccctgctaaacgtgaataatcttcatctgcttcttcatttacgacatctaaaatatcatctattgtgataatccctactaaatgatgttgatagtcgataacaggcatggcaataaagtcataatctttcattttttgagcaacacgttcttgatcctcttctacatttacacttacaacacgttgaatcattacttcttcaacatgagcatcaatatttgctacaattaaatctttcaaagatagaacacctacgagttgaccggcagtatcaacgacataaatcacatatatcgtttctgcgtcaggtgcttgacttttaactagcatgagtgcctcttttacagatgtaccaatgtccaatgaaatatattcagtagtcatgataccgccagcagtatcttcttcataatgtaataactttttgattttatctgtgactctgttgtccatcaaagctaataaactggcaacttttgagttagataattcatttagaatatcaactgcgttatctgtagacatattttctaatacttcacttgcataatgtgcatgcattgaatcaaataatatttcatattctttcccttcaatatctaattgattaaaaaatctactcacttcttgaggcgataaaaattcgaatattctttgtctattctgattcgttgtattttcaaaatattcactttgttcatattgatgtaaagttagaaattcttttctgaattgatctatatcattgcggtttaaactgtcatctagtagtttttgattgtatactttattatgttgtatgtcagttgtttctgtatttaatgacatcaagtgtacctcctaattttaatttacactttgatatattttttctaagtttttatagtctaaaataatctcgatttctttattatatattggatgtataaattttactttataacactgtaaagattgtgtttgaatccgaggatgaaaaccatcatataagtcatccccaataagtggatgaccaatgtgcttaaaatgaactctaatttggtgtgttcgtccagtatgtaatttaacttcacataaacttgcactgtgatgactactcaacgttttatattcagtttttgcatatttaccagatggcgtaatacaccgagtaataatactatctttgtttctaccaataggtgcctctatcatagattgttctttagttttaccgtaacacacacatatatatcgcttatctatttcaaatgtcgacataaggtgatgaatatgaccatgtttagtaaagataacgatgcccgtcgtattacgatctaatcttgtaacaatatgaggtactatatattgtactttattcgtagaatgatttaaataatacatcacgcgctcaattaaactatcatgaggatgttctcttgaaggtgcacaatttaaatggaccggttttgaaacgataattaaatatgtatcttcatataatatttcaatatgtttgtttgaaggacgaagatatgtacttggaacttcttccggcagtttaacaataagatgatcatcttttttcaacatatatctaactgtcacaggttgcctattaataattaaagcgccatcacgtttaatggcgctaattgttttctttgaataattatgacgttgtaaaaatgtcttaagcatttcttcgctatgaatatggtatacaaatttcatcaatcatcttcactttcaataaacgaatcatgaactcttttccaaaaaggaaatggtctaaatctagcaaaacgtactttttcatttgcgactctaaattgaatgtcgctcacatttttatgttttagactgacatgatcaattgttgttctaattgtattatgatttacaggtgtaatcaaacatgtatgatgctttggtaatactaagggtgaaccgaccgttctaaatactctattattaatagatgcaatttcagcaatttgtatggcttcaagagaaggatgaatcagtgcaccacctagtgctttattataagccgtcgacccagaaggcgtggaaatacatagaccatctcctctaaatcgttcaaaatgtttacctctaattgcgacatctgctactaatgttgatccattttcagttttcatagttgcttcattgagtgctagatagtgtgtttcattcttagtgttgttatatttaacaataatttcaagtaatggatattcaatcacttgaaattcagaatgatgaatttcatcaatcaatttttcaacttcatgaggtaaccagtctgcgtaaaaacctaaatgaccagtatgtactccaacgaatgccacatttgataacatatgactatactgatgaaatgcttgcaaaagtgttccatctccaccgacagatatcactatttctggattttctgtatcctctatcatatgaaaagaattcatttgattcatcattttatgtttaagcgtgtttgatttagagtcacctttagataaaatcgtataacgcatgtattgacacctcatcagtcatgtttttttgaacgtttttgagtataatatttttgagcttcttgtatttcctctttaatttcagacatctcttcatctaataagtaagccgcttcagctgctctttctagacgatgttgtatctcagcaggataatctccatcatatttgtatcttaatgtatgttcgattgtagcccaaaaattcattgctaatgtgcgaatttgaatttcagctaatatcattttttgaccacttaatgtttcaattggatactcgataattacatgatatgaacgataaccactttgttttgtattgttaatataatctctttcttcgacaactttaaaatcttgacgttgtctaagcatattaacaactacatcaatatcatcaacgaattgacacatcatccttaaaccagctatgtcgtacatttcttcacgtaatcgatcaaaaggaattccccttttattcgctttatcaatgatacttgtaataggctttacacgaccagttacaaattcaatgggtgaggcgttttctccaacttcatattgcttacgtaagccttttaatttcacctttaattcatcgacagcttgtttatatggtgttaaaaattgctcccattgattcatatggttccactccgtttcactttagttcgaaagtttcttcaactgctgaaacaaactccttaccatagttattatttccttcaacattttctaggatataacttaactcatcttgaaaatgttctaattctaattcatcgttaataattacttttttatctctattattatgtaacattgaccacgtctcttgtacaaaaatcaaatatgaatacgacgagccatcatctaataaataagcaaaactaaaattatcactatctacaagcatttgtcctacttcatctaatccatcagttggatcttctgagtagcaataaatgctatcatctttgattttaatttcatttacatatatacgcatgcttgttcctccttattattccttattagtttaacataatttaactttcaaacacacatttgagtaccatagttcaagtatgctctaaacgattaaatatttagctctatatattttatttttagtattgttattactttaattttttacaaatgtccgtcataatgaactacaataatatactaaaggttttttaatgaggtgtaattatgagtactaataatgaaattgaatttaagcaattaattgatttcaatacatataacgcgattaaagcttcttattttaaacaactcacaccattcactcaaatcaattattatattgaaacacctagttttaaactacgtgatcatcgttctgctttaagaatacgtgttaaacaaaacagatttgaaatcacactaaaagtaccagctaaagttggcttgatagaatataatcatctaatcgatatgaagcctcatattggacaaacaattgtcaaatcaacattacctaatgatattcaaaacattcttactgaatttgatattggagaaaacgaattaagtgttttaggtgcattgacaactgaaagactagaagttgaatttcaaaatgaactattagtattagataaaagtcaatactttgataaaacagactatgaattagaatttgaagtcaatgattatcaaataggctttgaaaaatttcaaaatttattaaaacaatttaacttagttcacgagccgcctaaaaataaagttcaacgattttttgaatatcaagctcaattataatagatgtgagataaacttgtgaaaagtcaaattacttttaaatgtaaaaattcatgttatattagaaatatattaatagaaatgggtgatactatgactacaacaccttatgatgtaataggagaaaaagctttgtatgatatgattgattatttctactttcttgtagagaatgatcaaagaatcaaccatttatttcctggagattttaaagaaacaagtagaaagcaaaagcaatttttaacacaatttctaggaggtcctgatttatacactcaagaacatggtcacccaatgttaaaaaagagacatatggcatttagaattactacttatgaaagagatgcatggttagaaaatatgtataaagcaatcaataaagctcaatttccaacaggagttggcgaatacttgtatgaaagattgtgtttaactgctaaccatatggtgaattcctaaatataattgaaggtgagttaaacatggctgaagaacttaaaattgtagataatgcgagtcgtgaaagcactaatctgtcacctgtaaataaaatagaaatttattcattctttgatccctttaataaagattgttttaaattatccgcaattatttctaaattaagaattgagtataatcaatatattcgaatcagacatattttgaatccttcattaaaggttttgactaaatgtcaagctcaaagtacttcagattttgataatattgctttagcatataaagctgctgaattacaaggtagattaagagcggaacgttttattcatttaatgcagaacgaaattataccaaaaaacgatattatcactgaagaaatgatttgtaattgtattaaaaatgctggtttagattatgatgttttcaaagaagacttacaaaaaaataaacttaccgaaagtttaaaaatagatttgcatattgcaagagaaatggaaattgaacaagcgccttcacttgtattttttagtgaagatgtgcatgaagaaggtttgaaagtcgaaggtctttatccttaccatatttatacttatattattaatgaattaatgggatgccctttcgaaaaagaattacctccaaatctcgaaacttatattcaatccaaacaattagtaacgatggaagaactgcttactatttatgagtggccggaaaagttactcgtaaaagaattaaaaaaattagctttacaacaaaaagttgaaaaactaaattatcctgacggcgaattttggcaatctaaaatgcctaagaaataacaaagagcgatcacttatatgaagtgtatcgctctttttatattaaattgatttaataattaagcataaaaaaacgccgtgtctgattacacgacgctaaacaaaggggatgggagaaatttttcacttcaaacaaaggggtatgtttgttatgtgattaatttcatgtatataatataacacgctcaaaacgccgtttcaatattaaactacatttccatccaaaatgtcacaaattagacacattgaaaacgaatacactatttttagtgcttcattaatttttcaaatacttctaatttttgttcaaaaacttcacacgcttgctctataggttctggtgtagtcatatctacacctgcattcttaagaatctcaattgggtaattagaactaccttttttcaagaattcatttatatatctttcaacagcaggttgtccttctgttaaaatttgatgacttaaactttgagctgcactgtatccagttgcatattggtacacataataattcatatagaagtgtggaatacgagaccactctttactaatatgatcatctgtttctaccacatcaccaaagtattgtctatttaatttagcgtactcttcattcatacgagttgatgttaatggctctcccgcttcctcaatttgatgaattttatgttcaaattcagcaaacatagtttgacggaataatgttgctctgaaacgctcaagttcttggtttagtaataatagacgtcgatcatcatctaaatgtttatccatataatcacttagtagagcttcattacatgttgaagcaacttcagctacaaagatagaataatcactagagtttgatggttgatttttacgactaaagtaactatgtgcagaatgtccaaattcatgcacaagtgtatataaatcagagattgtatcagaccaatttaataaaataaatggattagttaaatgtgcgcctgaagaataaccacctgagcgttttcctttattctcataaacatctacccaacgatgatttaaaccttctttaactacatctaaatattcttttcccattggtactagcgcttttagcatccattctttagctttgtcatatggcatttcaaatttaacatctttaactaatggagtataaatgtcatacattttcaaatcatcaatacctaaaagttcttttctcaattgagtgtatttatgcaacaatggaagatatttatgaactgttgcaactaaattatcatatacttcttcaggaatatggttattacttaaagcgcgttcacgtgccgttttatagttatgcgcacgagcattgaaaatatttttcttaacttcaccagctaaagttgagcctaatgtattgttatatgcaccatacgcttcatataagttgttataagctgactgacgtaattcacgatcatctgattctaaatatttaataaatgtaccttgtgttaaaggatgtttttttccatctttatctactgcatctttaaattctaaatcagcattactaaacatgccatagacattttctggagttgataatgcatcttgcgcttgggttaataatttttctttatcagcatctaaaatatgtggacgtttttcattaattaatttcaagtcaaatgcataacgttttaaatcatcgttactcttaataaaagattctaatttctcttcatcaatttgcaaaatctctggaactaagaaactccatgctgagctaatttttatgatgagttgatgcgcacgagattcaaaaccagtatatttatcgttagatgtatcttggtcttgttttaaatgtgcataaacatacaccttttctaattgtgttccaatctcatcttctaaagctaaagcattatataaagttttagcactatctcctagatgtcctttaaattgttcttctttacctaggtaactttctacctcttttaatgctttttcaaaagcttcatcgctttcaaaaatagttgttaaatcccaagtttcatttggatattttcgttcttgctcttctctagtaagttgttgactcatacatgtacctcctaaatgaattaatgttataattttctcattattttatttattttgcacgtttaaactcccacttacttgttgaatataatcatctattaactttaaagtaatttcttctttattaatatcctgtagataaaattgtctgaatttcaaatacgacattaaataatgcttgggaaggttatgttttaacaacaacttaagcttgagttgccattgtactggatgattttcaataaaaatttgatacgaaaaaatataacctgtatctctacatacctcatcgtcagttatttgtaattgatacatagcacttaaagacggttctaacaccgaacgtttttttctacaattaaaaatataacgactgatatgtctatttgacaatttataacaatatgactcattctttttttcattgaatgataataattcagaaatttgaataattcgtctatgcgcaataaattttcggccaccaatatgttgtatattgacatactttactatcagttgtttttcatgctcccaactatataacgttctatcaatcggattaatgaaataagcttgaaacgtgttcaagtataaataacccttacgatattgtaattgatcgataagccaaataactgcaactccaatttgttcaaatcctcttgatcgagatttaacctcttttatacttattcttgaaaattgaacttctatagctactttagcatccacaagaatatcaggatactgcataattttagaaaaataaggttctatttcaacattaaagtgatattgttttaaacgttgagcaataaaaaatttaacgtagtaatgtttttctgtttcatttttcatgcatctttttttaatttgagagacatgggcaaaatgcggaatcttttttaaccctttttttaaaagaagtttttttttgcaatatggacatcggtattcttcagtaatgatggcttgatgagcatatacggtttcattattacgattaatcgctactaacatgcattcacctcatactattaaacgtttaagatgattcatttacttttaaaaaagagagtagaaaagaaatttattttaaatttcttctctactctcgattaatcgttatatattattctactgaatcagtaaaataacgacgtacttgtgaagtaacattatgactcataataattttagcgtaatcatttaaatacacttctgttttatcactaggataagcgaattcaagtaattgactgtagctatcattaattgtctcttggctaacagtactatcgaagtgaattgcatagtagtaatgtgaatcactcatatacaataaatcttcaaaatcatctgtagatagattatgatgataagcgtaatgaatgacttcttctaagtcttcgaatttcacaataattgttcttaaactagaacgttgttgtgatggtttacgtttagatttatgtgcttgtttttgttgtgcacgttgttcaaataaatcttcaatactttcttcttgttctaatgtgttagctagcaattcattcacttgttcctcaaattgctcatttgcatgatcatctgacatgttcattgcttcttcatttttagatttagagattgtgacttccacacctttttcaaatgcatgtacttgaatccaaagaggtccttcaaccacaaaatcttcttcttcattaatctcgtccatcattgaccaaaagaattcttcaccacgcttacgatttgtccataaatcttcacgactaaatcctcttgcttcaatatcaccataagtgataaataatttcacagttgtgtcgtcaacgcgttctattctcatatcatctcactccttacagtcgatgaatagtaaccatattgtattagaacgtaagttaaattacaatttatttgtttgattaaatttcactattttaaataggacactatatcatattatattccctttttttattataaaaaacagcactatagctaagccagtgctgttaaataataggtttttaaattttaaatattagtcgactaaacgttgcgcttcttgtaattggaaagtacgaacctttctaggtaagaaacgtctgatttcatcttcgttatatccaacttgcaagcgtttttcgtctaaaataattggacgacgtaatagtccaggattatcttgaataatcgtatataaatcttgtagtggtaaagaatcaatatctacgtttaatttttgataagttttagaacgagttgaaataatttcatctgttccatcttcagtcatttttaaaatttgtttaatttcatcaattgttaaatgttcagaaaaaatgttacgctccgtatacggaatatcatgttcttgtaaccatgctttcgctttacggcaagatgtgcaacttggtgatgtaaataatgttaccatacatctcactctcctattgaataaatattattcattatattaataattatactaatttgtcttaagcttatattataagtataatatgttaacattaaaattaaatgagaaaatcctaatttttctgagaaatttcaaattttctaaaaattcctatacaaaatctaatctctcatatatacctctattataacataacttacaatttaaaaaaatactgttataatctagttaaaatgaattatttttaaagaaagtaggcatctatatggagacattattttcaggaatacagccaagtgggatacctacattaggtaactatattggtgcattaaaacaatttgcagaagtacaaaacgattacaactgttacttttgtattgtagaccaacatgcgattactgtcccacaagataaaatcaaattacgtaaacaaattcgtcagttagcagcaatttatttagcttcaggtattgatccagataaatcaacattatttattcaatcagaagttccagcacatgttcaagccggttggatgttaacgactatttcaagtgttggtgagcttgaacgtatgacgcaatataaagataaagcacaaaaacgtacagatggtattccagctggtttattaacttatccacctttaatggcagctgatattgttatttataatacaaatattgtgcccgtaggtgaagaccaaaaacaacatatggaacttactagaaatttagtagaacgttttaatagtcgttataacgatatattagttaaaccagaaattcgcatgccaaaagttggtggacgtgtaatgagtttacaggacccaacaaagaaaatgagtaaaagtgatgataatcaaaaaaactttatctcattactagacgaaccaaatgttgcagcgaaaaaaattaaaagtgctgtaactgattcagatggtattatcaaatttgataaagacaataaaccaggaatttctaatttattgactatttattcaagtttaactgataaatcaattaaagatcttgaaacacagtatgagaatgaaggatatggaaagttcaaaacggatttatcagaagttgttaaagactttttagtacatttccaagaaaaatatagcgaattttataattcagataaattagatgacatcttagatcagggacgtgacaaagctcaaaaagcttcttttaaaacattgaaaaaaatggaacgtgcaatgggcttaggacgtaagagataaatcattataaaaaagaccacgagtataagtaaattactcgtggtcttattttagttatctttcttttttcctgtttcacgatcaattgatttatcgatatatacatgtttcaatgtagtatctggaccgattttatgatactgtaatcctttgacctgtggattagttaagtgtgcttcacctttttgataaacaggagctactggtgcatcatgaagcaagatactttccgcacgttgtagcgcttcatttcttttttctgtttcacgtaacaatgaactatttgattcttttaaaagcctgttatattctttgttatcccaatcagtattattttgagcattatccttagtcattgtttctaaaaatgctgttggatcaggataatctggactccaacctgaataagtcgcttcgtaattattagctaattctaaagtggttttttgtttaaacggcatttgtttaatttttaatgtaacgcctggtaagtttgattcaatttgagatttaatatactctgcagctattttagaagctggtgtatcttgcgtattcattgtaaatgcaaactcttttttacctaattctttttttgccttttcccaattttgttttgctaccttaggattatattttaaaggagactcaaccgtacttgcgaagtctttaccgtcaggcgtcttcgctgtacctattcccgtgaaattatttgaagcaagagacccatcatttaaaacagtttttacatacccttttttattgatagcttgtgcaatagctaatctcaaatttttatttttaaattcaggcactgttttttcattcattttaatataaaaagtaccagcagttaaacgatagtttaattctttactgcctttatatttatcaacttgttcagaagtgatgattgtatcatcgattgaattagtatcatataaagaagcgccagcttgttaatcttttaaaactttataatttactttatctaatttgacattttttttatcccaatattgattatttttaaccaattgtattttatcttctacctgccaattagtaactttgaatggcccattataaactgctctttcagcattcgttccatattttttatcatattttttggcaattttagcatcttgtggataaaacgtacttaaagcaagtaattcatttatgtacggtaatggtctttctaaatcaatttgaagtttatatttatttaacgctttgattcctaaagaatttaatggtttttttccagtattaactaaatctgcattttttatatcactcattatatatgcaaattcagaggcggtttttggatctacaacttttctccatgcataaacaaaatcatgcgctgttacagaatctccgtttgaccattttgcatcttttcttaaattgatagtcagagttttaccaccattacttttttgtggtgtttcttttgctacacctaaagttactttgtcatttttatctattgaatataatccttcgaaagtttgaccagcaacatcgctagaaacagcatctgtaataagagctgtatctaaagtagttatatcttgagtaattatttttctgaatacctgtccttcatcagaatataaactttttttgttactacacgctgatagtattaaagtgacaataactaatagcgttaaatatttatattttttcttcacattcttgtcctccctttctcagatttaattatgttgaagatgagtttgatcttgttcttttaaacgtactgcttcttcatctgttacaaaaacgtaatgattaggtctaatttcttgcagtctacgttctgcatttttagattcatcttcttcatacacaattcgttttcttgttctttcactatcaggatcaggttgaggaatcgcagataacagtgatttagtataatcatgtaaaggatgataataaatttcgtcagacgttcctaattctacaatttttccaaaatgcattactgctatacgatcagaaatatatttaaccattgataaatcacgggcaataaataggaaagtaatacctcgttctttttgcaatttcagcattaaattcactacttgagcttgaatagacacatccaatgcagaaataggctcatctgcaataataaactcaggctctacagctaacgcacgagcaattcctatacgttgacgttgtccaccagagaactcgtgaggataacgattcgcatgttccttacttaaacctactgtttctagcaaatcatatacacgacgtttacgatcttttttattacttgctaacttatgaatatcaataccttctgctacaatatccatgacctttagacgtgggtttaaagatgcatatggatcttgaaaaatcatttgaattttcttattgaaatttaataactcttttcttttagtaatcttctggatgtcctgtccttcgtaaagaatttcaccatctgtaatatcatttagtttaataattgcttttccagttgtagatttcccacatccagattctcctactaatcccaatgtttctcccttataaatattaaatgaaatattttctattgctctaacttcattacgtttgccttcattaaaatactgcttcaaattttttatttctaataatacttttttactcttctccattgaacgacaccctttctactcgacgtggtttgtcgtaattattaggcatttgacgttgtctctttttcaccatttccagtggttcaacttttggggcgcgttcgtctaacaaccatgatttcacataatgagtaggcgatactttaaaccatggtggtgcttccttaaagtcaatgtctagtgcatattgactacgtcttgcaaatgcatcaccttttggtggatgtaataaatcaggcggggtacctggaattgcaattaactctgtctcgttacttgtcgttaaatcaggcattgaagataataatccccatgtatatggatgttttggatcatagaagatttcatcgacatgtccagtctcaatcatttgcccaccatacataacagccactctatcagccacatttgctactacccctaagtcatgtgtaataaaaataatagatgtttcaattttttgttgtaattctttcattaaatctaaaatctgtgcttgcattgttacatcaagtgctgtcgttggttcatctgcaattaaaattttaggttcgcatgccaaggcagttgcaataacaattctttgacgttgtcccccagagaattgatggggatatgctttaaatcttttttctgcattaggcagtcctactaaatttaaaatttcaagtgcacgtttctttgcttcagatttactataatgacgatgttttattaaaggttccatgacttgcttaccaatttgcatcgtaggatttaatgacgtcatagggtcttgaaatatcatagaaatatctttaccacgaagtttgtttaattctttttcagatttaattgctaaatcttcccctaaaaaattaattgtcccttttttaattctccctgtatcaccctggaacaattttgtaattgcttttgttgttacagatttgccagaacctgattctccgacaatcgctaatgtttcccctttatttaaaaagaaatctactcctctaaccgcttgcacttccccggcagtaatatcaaaggaaacatgcaagttgttcacttctaacactctttctgacatagattttgcctcctttgttatttacgcatttttggatcaaatgcatcgcgtaatccgtcactaaataagtaaaagaataagattaataaacttaatactgtagctggaataaataattcatgtgggtgtattaacaacattgctcgtccatcatttacgagtgaaccaagtgatgttttcggtgcaggtacccctataccaataaagcttaaaaatgcttcgaagaaaattgcacttggtacagtaaacatagatgttactacaatggcacctagtgtatttggtaaaatatgtttaaaaattaatttaaattttgaagctcccaatgttcttgaagccattacaaattcttgactttttagttttaaaaattcaccacgcactactctactcatacctaaccatccggtgatagacatagctaaaataatcgtccaaatagatggttcaaatatcaatacaaataaaataacaataataagattaggaatagatgctataatttctaaaatacgttgcatcacattgtcaacacgtcccccaaaaaatcctgaaatagcgccataaacgacccctataaagatatctagtgcagcagctacaatgccaataaataatgaaatttgagcacctttccatgttctagtccaaagatcacgacctaattgatctgtaccaaaccaaaagttttctttcacgcccgcttctttataagcgctcttaccatctgctcctgttccatcaaaaggtaaaaagtgtacttgatctagtactggaattttagcaggtaaatttcgtctagtaacatcttgttcggcataatcatgtttactaaatgctggtcctacaaatgcaagaatgacaattaaaatgagtccaaccaaaccgacaatagctagtttatttcttttcaactgtgtccaagcatcttgccagaagtttttactttcacgttgtatttctggttctttatttaaatcgagttctctaataacaaaatccgtcccaaccgctccctcagaggtatgtgacatcgctgcatttgaatggtcatcaaatggtttattaaaattttcaggcattattttttacctccttgtacacggattcttggatcaattacaccataaagaatatctacgataaaaattgaaacgataaataatgtactaaataaaattgtagtagccataataactgagaaatcatttgttgtaatcgatctaacgaattggtcccctaaaccgggtacaccaaagatattttcaatagtcaaagtccctgttaaaataccggctaacattggaacaataattgtaataataggaattaatgcatttcttaatgcatgcccaaaaagaactcttatcggcgagttacctttagctcttgctaataatatgtaatcagaacttagtacctctatcatttcagctcgaatgtaacgagctactgtggccattacacttgctgataatgctaaggaaggcaacactgcagttgaaaatccttcccatcctgccactggaaaccatcttaaacgtactgcaaaaacgtattgtaatagtactgctaagacgaatgaaggtactgatactgctataactgaaataacagtagttgtatagtctacccaagtgttttgtttcgtagcagctgctacgcctaaaattaaacctaaaatcactccaataatcattgcagtaatacccatttccatagaaggaatcaatctaggtctaattaatgaccaaactggttgattatgatattggaacgaatagccaaaatccccagttactacattttttaaataatgaagatattgcactgctactggatcgtttaatccatatttttcgtttaaaattgctttttgctcagcgcttaatttagcatcattaaatggtgatccaggcatcattttcattaagaaaaatgtaattgtgatgataataaataacgataaaaccatatatcccaaacgttttaatatatatcgcgtcatcatatagtccccctttactaaatattcaaaattaacattcccttcaaaattttcagaaatatttatacacattatatatactttttacataaaattgcaatataattttacattttcttaatataagtgtaatttatatatatattatttaaaagaatatatattttagattttatttatagtaagtttacagtaaattagactatatagataagaaggttggaggtatacatgaacaatattaaaacttggtttatatggctctttttgccactcatatctacttttttactttggatgttcgtaactcaacattcctttatctcatttgttgatatcttattttatatatcacttatattatttatattgttatttttacttctccttgtacaagaaggtatatttgatgctacaagttttggttttagacgcatgcgttatcaactcgcttctcgctctaagaaaaaaactttagagaacgatgactttttcaatccaaaacaagtaaaaaaagagcattataccatttcaacatggttactacctgctctaatactatgtgcattttacttcattttgactattcttatttcaatttttctataaacgtaaaaaaaccatgcatattattgcatggttttctactcttaacttaatttttaatctttaaactttttaaatactaatactgcgttatgtccaccgaaacctagactattactcattgcatattcaatttctaaatcttgtgattcattaggaacaatatctaagtcacattctggatctggtgaatctgcatgaatcgtcggtgcaactttagagtcacgaatagataatgcagagaaaattgcttcaattcccccagtagcacctaataaatgtcctgtcatcgatttagttgaactaatttttaagtttttagctgcatctccaaatgtatttttaatcgctttaatttcatacaagtcacctactggcgtacttgtaccatgtgcatttaagtattgaatatctttagcttcaatacctgcatcatctaaagccgcttgcattgcacgagaaccaccttcgccttcaggtgctggtgcagtaatgtgataagcatctccagttgaaccatatcctacaatttcagcgtaaatttgtgcgccacgtgtttgtgctgattctaatgattcaatgactaagataccagcgccttcacccatgataaatccatcacgtccttcttggaaaggacgacaagctgtttctttatcatcgtttgttgataatgcacgacttgcactgaatcctgcaagtgccatatgcgtaataggtgcttcagtacccccagtaatcatagcatcagcagcacctctttgaatgattttaaatgcttcaccgatagaatttgtacctgtggcgcaagcagtaacagttgaaccattaggtccttttgcacctaaatcaattgaaacttggccagtagccatgtcaggaataagcattggaacaaagaaaggactaactcttcttggtcccttattcttcagtattgtatgtgcaacttcaaatgtttccattccaccaatacctgaaccaatccatacaccgatacgattagcattatcgtcattgatagttaaattagcatcttctacagcttgtcttgccgctactactgcatattgtgtaaaacgatccatgcgacgcgcatcttttttcgaaatatgatcttcaatattaaagtcttttaattcacctgctaagtgaacgttatattcttcagtatcaacgcgtgtaattgtatcaattccattgacaccttttaaggcattttcccaatttgtttgggcatcgtttccaataggtgataatgcacccatgcctgtaattaccactcttttgttttcagtcatacattaaatcctcctatttaccccatttgattaccatagcgccccatgttaggccgccaccgaaacctacgagtactaaagtgtcatcatctttaattcttccattttctaactcttgttgaatacttaaaggaatcgaagcagctgacgtgtttccaaaacggttaactgaaacactcattttttctctttcaatacccaatctttcacgtgctgattccataattctgatatttgcttgatgtggtataaacatatcaatattatcagattctaaaccagctttttcaactacacgtgtagacgcttcgcccataattcttacagcgaatttaaaaacttcgcgtccattcattactagtttaccagtctctttatttaaatataagtattttccacctgacccatctgagcccatttcatagctaataatacctcgtccttctgagacttcaccaattactactgcacctgcaccgtctccaaataatacagcggttgaacgatcagttaagtcagtgattttggataatttatccgcacccactactagaatatttttatagtctccagattgaacatattgttttgcagtaatcattgaatacatgaaacctgagcatgcagcaagttgatccatagtaggcactttaccagtacctaatttttcttgtagtatattagctacagatggaaatggcatatctccagttgctgtagctacaataatcatatctatatcatttggtttaataccagcatcttcaattgctttcttacttgcttcatatgctaagtctgacgtatcttgatcgtcacgagaccaacgtctttctttaataccagtcatttttgaaatccattcatcagacgtatctaaaaaaccttcaaaataggcgttatcgactactctctcaggcgcataagcaccaaaaccttttatacctacgttcatgaacgtacaccttctcacttcattttttaataccaggtattaatttaacatactttttaaatctaactcaagtagttaaactttattaaacgattttgttaaacagtcacgagtcaataactcatataaaaattggtacaaatttttatacattctctactaatactatacaaataattcactttactttaaaatgataatatatataaattggaggtcttatatatgaaatacctcgtaacttttatttgggcgttaatcttaacacaaatggttaactttgtacttaatagtttaaatggtggcggcagtctagatgtgattaaaccaattattattgctatcatcattaccattgctattgccattttaagtgctatgattaaacctaatgatttcgctcgtaaagggaatagagacgtctaaatggtattgcattacgtgtttggagtaatataacgctcttaacaagtttaataataagaaaaggcattggaaagctttgctttccaatgcctttttatatactattcagctaaaggtttttgtacatcaaatgttaattcttgactatcgttaagatcaacatttacttttgtaccttctggcatattttctttaatcatcatacgagcgagtggtgtttcaatttgacgttgtacaaaacgtttaagtggtctagcaccaaattgtggttcgtatgcttcttcacctaaccattttttagcttcgtctgatacttcaattgaaatacgttgatccattaatcgaatatttaattgagttaaaattttatctacaatcatactcatatcatttatagataatggtttaaataatacaatatcatccatacggtttaagatttctggtttaaagaatgcatgtaaactatccataactgctttttcagtgctttcagtaatttcaccagaatctttaacattttctaataatatttgtgaaccgatattacttgtcatgataataattgtatttttgaaatctacgctacgacctttagaatcagttaaacgcccttcatctaaaatttgaagtaacacgttgaatacatcactatgcgctttttcaacttcgtcgagtagaataactgaatatgggttacgtcttaccgcttcagttaattgaccaccttcatcatggcctacataaccaggaggcgcaccaattaatctagaaacagaatgtttttccatatattcactcatgtcaatacgaatcatatgtttttcagaatcgaatagtgatgaagcgagtgatttagctaattctgttttacctacaccagttggacctaagaataagaaactacctattggacgattaggatcttttatacctgcacgtgctctcactacagcatctgacacaagatctaccgctttatcttgccctacgacacgttcatgtaagatatcacttaagtttaataatttttctctttctgtttcgactaatttagaaactggaatacctgtccattggcttacaatatctccaatttcctcatcagaaacaacttcgcgaatcatgcgttcattatcgccttgttcatcatggaaagcttcttcgtattcttttaattctttttctaattgtggaatcgtaccatattgtaattctgccgctttttcataattactttctgtttgcgcatcttctaaagcttgacgactacgatctaattcagcacgtttttcttgaactttcgcgattttttctttttcttgttctacacgagattgtaatgacgtttgtttttctttttcatttgaaagttcttcttgtaattcttctaatcgatgtttacttgcattatctgattcatttttcaatgcactttcttcaatttctaattgcataacacggcgattaacttggtctaattcagttggatttgatcccatttctgttcgaatagtggcacatgcttggtcgactaaatcaattgctttatctggtaagaatcgatcagtaatataacgatctgataattctgctgctgctactaaagcacggtcttgaatacgcacaccatgataaacttcatagcgttcttttaaaccacgtaagattgaaattgtatcttctacgtcaggttcacttacacctactttttggaatcgacgttctaaggctgaatctttttcaatatattctcgatactcattcaatgttgtagcaccaatacaatgcaattcaccacgagctaacattggttttaacatattaccagcatccattgcaccatctgttttaccagcaccaactaacatgtgaatttcatcaataaataggataatacgtccatctgattctttcacttctttaagtactgctttaagacgttcttcaaattcacctctaaattttgcacctgcaactaatgcacttaaatctaattcgaaaatagttttatctagcaatgattctggcacatctttacgcacaatacgttgtgctaatccttctacaattgcagttttacctacaccaggctctccaattaatactgggttatttttagttttacggcttaaaattcgaatggtattacggatttcttcatctctaccaataactggatccattttgccttggcgaacttcttctactaaatctctaccatatttctctaaagcttcataatttacttctggattttgtgaagtcacatgatttccccctctaactttagtaataatttctttgactacttcttctttatttcctacaaattgttgtgttgtttcatcaatatccatagcagcacgtaaaatatgttccattgagatataatcatcttcatattctttcatatatgactcagctttatttaataattcgtttgcttttgagccaatatattgtccatattgcacattatctccttgtactgatggatagtgtttcaatttttcactatacgcttggtttaattgatcagtgtctatatttgcacgttctaaaatacttttaaacaagctttcgtcttcttctaaagttccttttagtattgcttcaatttcaatattttgtaattcattttctttacttaattcaattgctttttgcaaagcttcttgtactttataagtcatttgattgatatccaaatttattcacccctactttttgtataagagtatggtcaaatacttctttatttgactttgactttgactttctttgaccttaattacattatagaccttctttgctaattaatcaacacttttactcatctttttaacaattcaataaatcctatcatatcaagcatttatttacgtttcactcattatttatcatatcaccttactatttaaacattgttaccttaattttttcataaatgttaaaaaaggattaactttgtgagcatcctcaactagttaatcctttttaattatttattttttagtcatattttttagtatttcgtccgacaatgcttgtaccccactatgttctaagtgcaccccatcagatgcaaaatattcagtatgaccggcagaacgtttataccagtctactaaaacaacatttttatgtcgtttagctgcgtctgaaagttgtttatttacattatcttgccagcttctcggtacccttgtattaactaaatatattttggctttaccaaatttactaataagttggtcaagctcatcttgagtaaaatctccatttgtaccaagttctaatacaacttgatttgatggtttattataattagtataattatttgcaactatcaaagcttcttgcaaatggcgacctactttaccatctatagttgctttaggaacttgagacttaaattcttcaccaatatctaccataactgaatcgccaataagtaatgggctgatattggtgtaaactttatctttattctcactcttacttgtttgtccatttaacttaatattttcaccgggcatcattttaactaaatatttatcagcagtacttgtattaaaactgtttgctttatttgcaatttcatcttttccaaatcgatcaaatgcacccataaatattaatagcaatggaatcacagctatgatagtaactattgttcttataaatttaggtctacgtaatcggtcaaaagaaaatgcgcttaacccttcacgtctaaatggtgtttcaatataacgataagataattccgcaaacgccacagttaatagtatatctaagatatatacatatattggtaactgaccatcaacaaaatgtatatgtagaaaactaatgacggcgaaatgccataagtataaactatatgaacgttttccgatatacactaacaaaggatgtcctagaaatttagcaatcattgtagacgggtgaacgacacttgcaataacaaataatgtcactaaagatatcaaataaaacccgccattgtatatccaatcattatcgtcgttaacagtaaagaataaaataattaagataagtaggctacctataccaattccatctattgcacgacgtaatcgttgtggtggattaacttttaatttaaatggtggccaaacaaacgccaatatgacgcctaataataatgtttgtaaacgagtatctgtaccaaaataaacacgagaatatcccacatttggttgtgatataatgaccatttctaataaagaggccaatgatactatccaaaatataagtgtcacattacgatattttttaatcgtaagtaataatatcactaaaatgaatgggaaaaataaataaaattgttcttcgatagcaagagaccataaatgtttaagaggcatgaatgaaaattgttcaaaatagttaacatctttagcaatataccaccaatttgaaacataaaatagcgctgcaataatatcatgtttaactctaataatttgttgaggttcaaataataaggttgcaatacctactgttattaataaagctatcaccgctggcaatagacgttttatgcgtctaatccaaaattgtttaagattaataattcctttttcttcatactctctcaaaagtaaacttgtaattaaatatcctgaaataacgaagaaagtatctacaccaataaaacctccagttagccactttctattcaaatgatatataatgatgcctaatacggcaattgctcttagaccatctaaaccaggcatatagcgcatttttgttttatcatgcacgcccttttctaaattttgtttcattgttcacattctttccctattaaataataaattttcaataaattcattagatataaaagcactaaaatcagaataacaataaagttaattatagaagtttatatgtatgattggtcattctatagtctatgaatttaatacactgtataatatgattctgtgttttatactaagttgactgaaaacttgatatacaattaaataaaatataaattcattttcattgattaattcttaattgttgaaaattatactttttctaagatataagtcttatgtattgtagtataacctagaagtaaattcaatttatattacaattgtgtcatttcttttttactcatttaaaaataaaattgtcacattcttatatattaaaaaagagagtagaagaaaaattcatcccctactctctattaaatattgtatctagcgcttcataataaatagcttcatacattaatgctatcgagctcgcttaaatttatccaacgcctaatgcgatttttgcatatctagacatcatatctttattccatggcggattccaaacaatattaacttctgtatcttgaatctctggaatttcggctaatactgtcttaatttgatcgatgatttgtggtccaagtggacagcccatagatgtaagtgtcatttctacagtacataatccttcatcatcaacgtttactttatatactaaacctaaattaacaatgtctatacctaattcagggtcaattaccatttccaaagcgccaaggatactatcttttaatgcttcttccattagtatcacctctccataattatctttacactaatatatcaaatatccgacaaaacgccaataaaatgctatgatacaaataaactaatatttatgaaccgtaatgcaaggagatatttatgaaaccttatttaatttgtttagatttagatggaacattattaaatgataataaagaaattagtgattatacaaaaaaagttttaacttctttacaaaaacaaggtcattacttaatgattgcaactggacgtccttatcgtgcaagccaaatatattatcatgaacttaatatgaatacacctattgttaattttaatggtgcctacgttcatcatccaaaagcagatgactttgaaaccaaacatgaggtattagatgtagatatcgctagaagtattatagaggcacttcaaaaagctaatgttacaaatattattgctgaagttagagacagtgtctttatcaataatcatgatcctcgattatttgaaggtttttcaatgggtaatcctaaaattcaaacaggcaatttattagaaaaacttgatgaatctccaacttccatattagtggaagctgaagaagtgaatatcacacgtattaaacaaatgttaactcgtttttatgctgaaaatattgaacatcgtcgttggggtgcaccctttcctgttattgaaatcgtaaaacgaggtattagtaaagctcgtggcattgactatgttaaatcatatttaaatatagattcttctaatattattgcatttggagatgaagataatgatttagaaatgattaaatatgctcaatacggaattgctatggacaatggtttagatgatttaaaacatatcgctaatcatattacttattctaataacgaagatggaattgggcgttacctaaatgaatttttcaaactagaaataccttatcaataataaaaatgagagtacttaaagtaagattctaaagattataattgtatctcacttgtttacttcttagttatggaggatatgtatgactaaaattattatagttggtgctgttgctgggggcgcaacatgtgcaagtcaaattcgtcgcttagataaagaaagtgacattatcatttttgaaaaagatcgagatatgagtttttctaattgtggtttaccttactatattggacatctcgtttctgatcgtcatcaaatattgcctattacaccagacgtttttaaagagaagaaaaatattgtagttaaaacacatcatgaagtaattggagtcaacgatcaacaacatgttgtacgtgtattgaatcatcaaacaggcgaaacattcgatgaaacttatgacaaattaattttaagtcctggtgctagtgcgaatactcttggatttaccaatgactttactttcactctaagaaatgcagaagatatggaccaaattgatcaatatattactcgtcataaagctaaacgagcattagttgtcggtgctggttacatttcattagaagtattagaaaatctttatcaacgtggtcttgatgtgacatggattcatcgttcagataaagtcaataaattaatggaccaagatatgaatgtagccatttttagcgaaattgatcaaagaaacatttcatatagattaaatgaagaaattgaatcaattcaagcgcatactgtttattttaaatctggtatacgtgaagattttgatattattattgaaggaataggaactcatcctaattcatcatttttacgttcatcaaatattcatatagataaaaaagggtttattcctgttgatgattgctttaaaacaaatatacctgatatttatgctctaggtgatgtcatcacctcacattatcgccatgtaaatatgaatgctcaagtacctttagcttggggcgctcatcgtgcagcaaatattatagcagaacaactctcaggtaataaaaatattacatttaaaggttttcttggttcaaatattgtaaaattttttgactatacttttgcgagcgtaggaataaaacctgaagaattaagtctatttaattatgagatggttgagattaagtctggtgcacacgcagaatattacccaggtaatacacccctacacttacgtgtctattttaataaagacaatagacgattattacgcgccgcagcagttggaaaacaaggcgccgataaacgcattgatattttatcaatggctatgatgaatcaacttacagtagatgaattggttgaatttgaagttgcctatgcgcctccttatagtcatcctaaagatttaatcaatatgattggttacaaagcacgcaatatataaaaaagaatcgtttgagtagacactcaaacgattctttttacttaacttaaaccgaacattttagataatgggccccatggtaagataattccaagagccatagtaataataattaaaataattgttgcccaaaataagccatgactaggtgcatgtttttttcttttagctaatgatacttccattaaagcaacaacacctaagccacataacatttttaaagtaagaagcatgtggttgccaccctcaccatgactcgctgccataaactcttcaattaattcccagaatcctgagaataatgtaaggagcataaagactctaagccccatatgtaatgatttaaaagttggtgttggtccttgtgattttgaaatgtgtaaaaatgcaataatgtataacacaatggttaaaacccaacttacaatatgcatatgtaacaaaacttgattccctccaatatttataatcattttctttcaattatcataacacattttcactttttaagtattaaaattaaaaaagaagagaagccttagcttctctcgctttaaacataactagcattattgtttggcaatataagttgtcaaagtaccaatgttatcaatagtgactttaacttcatcacctggttgtaagaattttggtggttgtaatccagctcctacacccgctggggtaccggttgcaatgatatcgcctggatgtaaagcaacatatttagaaatttcttgaattaagtcatcaattttattaatcatttgactagtatttccatcttggcgaatttcattatttactttagtgacaatattaacattttctggagtaggtaattcatctttagtaacaatatatggtcccattgggcaaccacctgttaaacttttagataagaatgcttgatcttgtgcattttgagcagtgcggtctgtaatatcgttaataatggtatagccataaacataatctagtgctaagcctttaggaatcttttcgccatgtttaccgataacaatacctaattcaccttcgtaatctaactgatctgtaatatctttatgatttggaattgttgcgttatcaccagttaaagaagaagctgctttagtgaacacatataaacgttgcacttcatgatttaactcagaagcatgatctttatagttacggccaaaagcaataacattgttcggtggtgttacaggaggtaaaaattcaatatcattaaatgagaatttatactgatctgcttttccactattttcaacagctactactgctttacgtacttgttcttggaaatcgagtgtttgattttgttgtaaaccttcaagtaacgtttgtggatggaagtctccttcaccaaattcagcaaaaatttgttttaaatcccatacagcgtcttcacgctttactttaacgccatatgattcagcgttattgtatttgaatgataaaaatttcattcattatcaactcctcatctatatcttatttcatattataactttaattattaataaataacaaatatatatgtctgaaattttagaaatttggcgcatcttttctaaaataaaataagattgatattataaaccatcttcaatgctcatttcaccgaattggaagaaatataaatagccgtgcactcttttatttagtattgtttctaaggtgtttttgtaatatttcatttgaattttatacttatcacgtaattgtattccaatttcttgatccgtcatccctcttcttcgattaaaagcgtctgttttgtaatctacaaaataatattggttatctttaataaaaatcaaatcaatcataccttggataatggagacatcttcatctaaatctggtatttcatctacacgtgcttggttaactacaaatggtaactctctgtatacttcatcagcttgtgcaattttcatatataagtcactacgaataaattccataattctttcaaattggatatcttttttagcgtcttcttcaataatgtgttgatcaattaacatatgaatatagtcatctaactctgtttcagttaatcgttgttctctaaatggaagatgctgcataacggtatgcatcaatgtaccaatttcattagctttacgttttctttcttgtcttaagaatttaggacgttcataagtataagcaccaatgcgatattgtcttactctatcgtaacttgttccatcttctttagtttctaattgacgttttaattcagatacagattgttttgatggcttttgagtattttttataaatggatacttaaacgttaattgatgaatcatttgttgttcgttttctttattattcggagcctcttcttcaatatcattgatagttcgatgtaatgtctcatttgaatcgcttattaaagataattcatcgaaatgaataattttcaaatctacatatggtttcaaactgtcatctaattgattgatagatgtctcaaattgataatcagatgtgatagattgagataagtgtttcgctaaaatactatataccagattaaaaggtcgttctactgataatcttttatgaagtgcaatgagttgatttgaaataggcaaacgttcatactttcttaacttttcttctttatctaccgttccgattagaatgagctgttcttttgcacgagttaatgccacatacattaaacgcatctcttcagaaatcaattctttttctgttaatgatttaacaactacagatgaaagtgatggataagaaatattgtctgttaaatcatagtactccattcctaaaccatatttttgatttaatactaaaggtttccgaatatcttctttattaaaattcttagaaagaccagaataaataacatatggaaactctaaacctttactactatgaattgtcatcattcgaactacattatcattaggtcctatcacattttcttcaccaaaatcttttttacgctctatcaattcatcgataaatcttataaattgataaagtcctctaaacgtagaattttcaaattctattgctttattaaacaatccaaaaagattagcgcgtctgcctttaccaccaatcagtccactaaaatattgaatgacataatgatcattatagaacttatcaattaactgatacacaggatgtgtttgcccataatcttgatataaatgtatatcttcaataaaacgacgtaatttattaactaattgtgcgttagcttgatcatattttatatagtgtaaaattgattgataaaagtaatcatcgtttgaactgactactcgaatttcagcaagttcatcttcagtaaattgataaataacagagcgcattaacccaactagataaatatcttgcaatgggttatcaatcgttctaagaaacgatagtactagtcgtacttccgtttgttcaaaataaccttccttactattaacatggaacggaatattattatctttaaatactttttgcaaacgtctagcattactcattccacgttctaaaataacaatatctttataagttgctttacgataggcattgtttttcgcatcgtaaacgagtttattgtcaaggatatgttttacttgttcaactacataatatgcttcttgttcctgtctatctaaatctatgtcctcattttcagatttaataagtgcatgtaattcgagtggcattgctttttctggataataatgagctccgaaatataaacgtgcatcggcatcataattaatttctccaaccgattcatccatcatatgatcaaaaagataattagtcgttgaaagtacttcctttcttgagcggaagttattagataagtcaattcgaagtcctgtttgttgcccttctttagtgaatcgatgatatttactcataaacaatgtaggatccgcttgtctaaacttataaatagattgctttacatctcccaccataaataagttgccatctaattcatcaccacgtttgatagtagatataattgcctcttgtacctgattggtatcttgatattcatcaataagtatttcttcaaattgatgacgatactctttagcgatagtagaaggcgtcccgttttcatctgttaatatttgtaaggcaaaatgttcataatctgcaaaatctagtacatttctactacgttttttcttagcaaaatcattaatgatatctttaatgatttgaactaaatattttatccgaggcgctaactgtttcatatcgtctttaagttcatctactgaacgcattaaatatttattttttacattttgaatggtttcattatattctttatagaaagatttaatatcttcaagtgtctctaaatcttcattttctttttttatttttgatgacatttgtggaaacttttcaggtgtatgattaagaagtgcatctctattcaaaacaccatcttctaatattctttggcatatcattttctctctttggacaacttctaaatgtttttcaacagcattacaatgggataaaagattttctgcttcaagaagtgagtcaaatgctgctttcatatatatttctgctagtatttttaattctttaaggtagtcttgttgcttctcatcattctcgtaaggatcgactaatgaatctaaccatttaaatggtgaaggattagctatactaaaataataaaatcgttttaaaatttctctaaatctatcgtcatttctatcatttgatagttgttcgactaaagtcaaaaattcaatatcaggatcttcataatgatgttctagtacttcatcaattgattgctctaataaaagtacattttcaacttcactaatcgttctaaaattagggtctagttggataacatcataatgttgttgaatcacttttaaacaaaaactatgcagtgtagaaatttgagcttgatgtatttttatacgttgactttttaagtgttcattcttaggatcctctaatgaagcttgttgaatacgttgttctacacgatgtttcatctctctagcacttaagttcgtaaatgtcactacaagtaatttatcaacatctacttcatcttttaagattttttgaataatacgttcaactagaacagctgtttttcctgagccagcagctgctgcaactagtatatcttgcccttttgcatatatactgttccattgtgcatccgtccattgtgcatctttaggttttactggaatattattcattgtcctcaccgctttctaattcgacctcttgaattgcttgaattggattaatcgattcatctacatggcgataatgtttactatcaataagactatctacgtgacatactgactggaaactacaaaattcacatggtaatttgtcttcaaatttaagtggagctacttctgtgtgaccatccataatatttgaagcagtctcaataaaattatttttattgtgttgaataaatttatgaatcgttgtttcatcagcaacttggcttccccgtgcactaatacctccatctttttttaatgtcacgggtacaatatctgatttagatatctcgttaagtcttatatccatagcatctataacttcagcatcactattgattaatccttttaatttatattcttttagaatagcttgattaatattttccttattcaatgcctcttcagttaaatcgccccatttttcaaatttcaaacgttcatcatgaatgtggaaatataacaatccacctggtttaacctctgaacttaaaccaagccgctctgaattttgtaatacgatatccatatacgtcatcatttgcatctgtttaccataataaacttttttcaaatttaaattggcgctatgattagatgatttataatctataatatttacaaaacttgtattattttttgtataagcatcgatacgatcaatttgtccacgaatatgaatcggtatcccttgtgtcgtcattaagggatgtgcaatcaactcttcttccgttcttggtttctttctaaaagcagtttcaaaacgttttggtctaaattttgtattctcattttgataacgaagtgcctttaacgtactttcaacaatgacacctatacgtttagatacataacgataatatgcattggaatccattaaattaaattgcacttgtggtaagacatgttgtagagcttcttcagtaagtgcatggattttctgattatccaattgactaaattctccatttactttatccgaaatatattttaaagcattatgaaaaatattacctaaatcaaaactttcaagttgatatttggtacgttcatttagacgaaggccgtaagtagcataatgttggaatgggcaatcattataaccttcaaatcgtgaaacactagcattaatagacgttccatataatgcttctgacaattgtggtgtgagttgaatggtttcattatcatatgttaaagctgttgataaatagtttatactgtcatttaattcttcattttcacttataactttataagcatcaagccacgtatctgctaccgcttcttcttccaaccacgatttcaatgcttcaaataaatgaattttagtttgatgtggatgttccattaatgtaagaggataagcatgatgaagataatgaatatttttgatatccaaattactgaacagtgcttgaatctgatttaaaaatggacttttctctttttcatctccttgcatccccataagactatatgaaaaagtcatttgttcacatgcacgtgtcatagcaatgtagcatacaaatgcttcatccatttgtaagatatcagaggttggacttaattcaacacttccccgttcctctaacaaacgtttttcttcatcagtgattaagcttgaagatgacaagggctgtggcatcactccatcattcatcccaaccatataaacgtgttttttattatcaacttttgctaaatccatagtccctatgctaacttgatccaatgtttgaggaatcattacaaattcaagttgctcaagtccaatgtcaaatacttctaagaatcgatttaaactcatttcttcttcttcaaatactgtgactaaatcatctaatatttgtattaatccattccataattggtcaatttcttctgctttctcatggtctccttttaagtctagttcatcacggtgggccattaaatatttaggcaaatcaaaagcttccattgtttcataaaatgcagttgcataatctctaacatttttagagtgaagcatggctttctcaaaacgaagtattttatttacaacatcatcctttaagcgtacgacgtcttcaaatgcttctttttcttcttcagttaattgatgcgctttacgtcccatttttgtaaaattatcgatattaaacaatttatcatctaaccattttttaccgtaaatacctcgttcaatgacaaagttttctaatagatcaattaagtaactactatttttaaattgattagataaaatattggttttaaatagtctcatcattggactaagtcccatattactttggataacttctaataaagaacgtatcatttccattataggatgatgtgtcatcgattttttagtatcaatattataaggaatatcatattgtggcaaaatagattcaaatagataggcatatgtttcatctctatataaaattgcaatatcttgatatctaaagtgtttatcacgtgtatctttaataatacgtcgtgctatttcattaacttcttctctcatattcgatgactcaagtaaatcaatataaccatgggattgagttggattaacttgaagtgcgtcaaattgttgttctaattgtaataaatccttatttttgaaacgatatggtgttgtaaaataatgttcatttaaaggtatatgtaattcatttgcaatttcttttaagtgaataagtacgtcagaaggttttctaaacatactaaagtgatcttcattaccatctgtagttaataatatagtaacttgtttagcattttgtactaatgctttaataatttgatattcaagcgttgaaaagttataaaatccatctatataaatatcagcatgcttaatccactcagatttgtgcattatttcaataaaataattaagactgtcttcagcggtaataaattctccatttaatcgttcttcaaaataatgataaataagcgaaatatcttctagtttatgtcgggttcttgtttgtaattcattatcttctaaaaataagtcaagttgatgaggtgttacagaatatttcttaaaatcttggatttgttcacttaatttttcactaaaaccataataatctgcttgagattgatataatttcatttctgatttgtgttgttgaacgatattgaatatcatcatttcaatagctgctttagttaaacgtgtttcagttaatcctccgagttcttgaaagattctatagctcaaacgctcaaaatgtaaaacttccgttcttaaactcccatttaactctcgatcatttacgaaagattgctccaattgaaacgtactttgggtaggtgcaattaaaatgataggatctccaagaggattttctttcatttgttgtttaatatttttaatcatatgatacgatttaccggtaccagctcttccaagatatgtatttaattccattatctacacgctcctttaaactcattttaccacggaacatacgttcttaaaaagtaaagtagataaaataaaagtagaatgcgaattcgcctgaattgacattctacttttattttaaattgatatcctacttatctggattaaaattaaatttaaaattatttaatggccaaaatctaaatgatactttaccgacgatttgttgtttatctattaatccaaacgctctactatctttactaacttcacggttatctcctaatactaagtatttatttttaggaataacgttagagttaggatgagcattaagaagatccttagtttcaaaagatccagtaatgtactctccttgtttatgtttttcattatagtctaagtaaggctcatttacctttttcccattaatatatagctgatcttttttatatgtcacactatctcctggtacgcctattactcttttaacatagtcatcagattgattagcatggaagacaataacatttcctttttttatgtttcctaccttataacctaaaatgttaaccatcacatgttgcccatcttttaatgttggatccattgagtcaccttttattgtataggatttggcaacaaaagtgactacaagccatacgagcaataaacctacagctatcgcaacaatccattctgttatttcttttttcaaatataacacctcatctatttattaaactcatagttgaatgatctaaaaggataatatcttagacatacatttcctataacatcactttttttaattaatccatatcttctcgaatcagttaatgtattactatgatcattcaacactaaaaatgagtcaggtggaataatatccccatcagtattttctaaatctcgtaatgcgaaatcattaatatctctatttttagcataatatttattcacttgtctatcatctttatataatttaccatgccttatttctatcgattcgcctgctttcccaataatacggctaaaatgaatttgattatgatgccgatacataataatatccccttcatttaataaattaaatgtcactttcaatttattaatcattatataatcatttttatttagagtgggggccatttcattagtatgaacaattgcgcttcttagtaaaaaaatttgaataaacatcacgaaaataattgctaaaataatggatatacttgtacttataattcgacgcaaaatgtcactcctcatgtgttcccataaaatgtttttcaactctttttccaataaaccatatgactatagtaacaataattaaaataattgctcttataggatgagttaaaaatgtagtcacttctctacccatcaccgctaaaaatgatatggaaataagctttgaaaataataaaataataaaataattcttcattttaatatgagaaaaactagctacaaagttcactactgtattaggtgtaaatggaaaacacattaatataaaaataggaacaagtccttgtttatctataaaatgtgtgagttttttcacacctttttttgctttaactctttgcataaaagatgtatcaacgaatttcctacaaaaataaaatacagtaaatgttccagcgacgatccctaaccaactaataatagttcctgtaataaaaccataaatatgaacatttaagatgacatagagagttaaaggaaaaacaggaattatagctcttaaatagagaataataaaacctgcaatgtatcctaattgttgtaacacattaaaccaatgttcaatttgatgaaacactatatcatcaaatcctttcttgaaatttcatcattctctattgagtataaaattattttacactcttttcttaaaaaaactattaattcactaagaaatcagtcacaagtactagataacagatttaacattagtcatattaatcttttaaaaaagaatgagactgaattcacaacgaattcaatccttttctcttgaccccatcttacgttaaacaaaaacttctttttatgaaagtctatatgctaaaaaagattgatataagtatatattcaattgagtcattgactgccaatatattaaaaatgcctaagacagctcatcgtgtcctaggctttaaatgattattttatttaaatttatgttgatattataaacgttcttctaattcttttttcttatcctcataacctggtttaccaagtaaagcaaacatattttgtttataagcttctacgccaggttggttaaatggattaacacctaattgatagccactcatcgcacaagctaattcaaagaagtaaacgacataaccgaatgtttcttcatctaaacgtgggatattcacaacgatattaggaacgccaccatcagtatgagctaataatgtaccttcaaatgcttttgtattaacttcatcgattgtttttccagctaaataatttaagccatctaaatcgtcatcatctttttcaattgtaatatcatgtttaggttgatttacttttacaacagtttcaaataagaaacggcgtccttcttgaacatactgacctaatgaatgtaaatcagtagtatagtttgcgcttgaaggataaatacctttaaagtctttaccttcagattcaccgtataactgtttccaccattcattaaagtactgcatagatggttcgtagttaattaacatctcagttgtataacctttattataaagaacatttcgaattgttgcatattgatatgcaatattctcttctaaattttcagatgatagttctttacgagctttatttgctccattcataattgcttcaatatcaatacctgcagttgcaattggtaataatcctaccgcagttaatactgaataacgaccacctacatcatcaggtacaacaaatgtttcataactttcattatctgctaattgtttcaatgcaccttttgctttatcagttgtagcaaagatacgtttttttgcttcatctttaccatatttttcttcaactaattgtttaaacaatctaaatgctacagcaggctcagtcgttgttcctgatttagaaatcacatttactgaaaagtctttatcagacaagtaattcactaattcttgtgtataacttgaagataagtgatttcctacaaatacaatttcaggatattctgtattgttacggaaagatgaagtaagcatttcaattgcagcacgtgcacctaaatatgaaccgccaattccgataactaccaatacatctgaattcgattgaatatgtttcgctgctttttgaattctagaaaactcttctttatcataatcttcaggtaaatttatccaacctaaaaagtcgcttccagcacccgtaccttcatgaatcgttttatgaattgtttttacaatatctttttgttgatcaagttcatgttgaccaaaaaattctaacgttttgccataatctaattgaatatgagtcatttatagatcctccaatgtttatgaattagtttcattttactaactttaagttatctattcaatgaacaagttcaattattcaaaaaatagtctgttttttttttagaatcattgaattactttactttgtaatgaatacacaattgaaatagcaatcaactctttagttgtagtaatattcaatgaatatagaaataacaatagatgattaatactattccaattatctttattttgcataaatatgtaaaaaaatggttttattttcaaaaacaatctgttagtatagaattatattaattttcagaaaaattttgaggtgacaatatgaaagataaaattgttttagcttattcaggtggattagatactagtgtagctgttaaatggcttatagataaagggtacgacgtagtagcagtatgtttagatgttggcgaaggtaaagatttagatgttgtttattctaaagcattagacatgggcgccgtcgaatgtcatattattgatgcaactaaggaatttagtgaagattacgtaagttatgcaataaaaggaaatttaatgtatgaaaacagttatcctttagtatctgcgctttcaagaccgttaatagcgaagaaattagtagaaattgctgaacaaacaaagtcaatcggtattgcacatggttgtactggtaaaggtaatgatcaagtacgttttgaagtagcaattaaagcacttaaccctaatttgaaaacatttgctcctgttagagagtggggctggagtcgtgaagaagaaattgactatgcagtcaaacatggtattcctgtaagtattaatcatgattcaccttattcgatcgatcaaaatttatggggtcgtgcaaatgaatgtggtattttagaagatccctatgctgctccaccgaaagatgcatatgatttaactgctgaattagaggatacaccagatataccagatgaaattatcttatcatttaaaaatggtgttcctgttcaacttaaccataaagactatgatttagatcagctaattctaacattaaatgatttagctggtaaacatggtatcggacgtatcgatcacgtagagaatcgtttagttggtataaaatcacgtgaagtatatgaaacaccaggtgctgaagttatattaaaagctcataaagctttagaaacattaacattaactaaagatgtggcgcattttaaaccagtcattgaaaaacaatttgctgaacaaacatataatggtttatggttctcacctttaacagacagtctaaagcaattcatcgatagcactcaacactatgttgaaggagatgttagagttaaattatttaaaggtaatgctattgttaatggtagaaaatcgccttatacactttatgatgaaaagttagcaacttatactaaagaagatgcttttgatcaatcagctgcagtcggctttattgatatttatggactgccaacacaagtaaatgcttatttacatggaggttatagtaatgagtaataaagcatggggaggtcgttttcaacaacaacctgaagagtgggtagatgtgtttaatgcttctattgactttgaccaaacgcttttagatgaggatattcaaggtagtattgcacatgcaacaatgcttgcacaccaaaacattatttctgaagaagaaaaaaatgctatcgtaaaaggtttaaaagatatacaggcagattttcataaccataatattgaatttaaacatgctttagaagatatacatttaaatattgaacatgaactgatacaacgcattggagatccaggtggcaagttacacacaggtcgtagcagaaatgatcaagtagcaacagacttacatctatatgtaaaaaaacaggtcattgagattcaagcacttattcgttcattccaagaatctattttaactctagcaaaatctcacgtagaaacgattatgccaggttatacgcacttacaacgtgctcaacctatttctttcgctcatcacattatgacatatttttggatgttggaaagagactatacacgttttgcagatagtttaaaacgtattgatatatctcctcttggcgctgcagcattgagtggcactacacatcctatcgatagacatgaaactcaagaattacttggttttgaatatatttatgaaaatagtcttgatgcagtgagtgatcgtgattacattattgaaacattgcataatatatcattaacaatgactcacctatcacgttttgcggaagaaatcattttttggtctacggatgaagcgaaatttattacactatctgatgcattttctactggttcatctattatgcctcaaaagaaaaatccagatatggctgaactcattcgtggtaaagttggacgtacgacaggacatttaatgagtatgcttgtcacattgaaaggcttgcctcttgcatataataaagacttacaagaggataaagaaggtttatttgattcagttcgtacgatgaaaggttctttacgtatttttgagggcatgcttaatacgttaacggttaatacaaatcgtttaaatgaaactgtacatcaagatttttctaatgcaacagaacttgcagattatttagtagccaagaatgtaccgtttagaacagcacatgaaattgtaggaaaaattgtctttgaatgtattcaacaaggcatctatttattagatgtaccatttgaacgttatcaagaattaaatgataaaatcgaagaagatgtatatgattacttaaaaccagaaaattgtttaaatagaagaaaaagttatggttctacaggccaagatgctgtgcgtcatcaattgaacgttgcagaaaatattttaaaacaataatgaatactattattaaatgactatgaatcgaataaataaagattctaataaagcatctacttgaggattaactctaaatcgcttaatcgttttataagaaggggtttgattttgtgaagatcacatcatttgtgagaataagtactgaagtttcctttcgtagagtcagttaagtcatgttagaatttttatacataaggtacttcgttaatttagtttagtgttgtttattaaattatacgaaagtgccttatttttttaaatatttcactgtaaaattacatatacatacaaagtaattgggcgagactcatttttagttaaatttaatttaattattttaactttctctatatttattgttaataaattaatagttttgctaaaattttgaaaaaattattctaaaaatttcttctctttgctaaagttttaatgtatttttaaattgaattgagaggatgagttttttgaaggtttctaaaaaagcaatgatatctagtttagcaatagccactatcggtttagtaacattatataatccagtagaagcaaataataatcataacaaccatagcaatgcttctaattctgctacagcacatcaacagtttaatcaatcacaaaataaatatacgtcagtagcgattagtaaacatcgtaatcaagatcattcgaattggatgaccaacttaactggcgaacgttttacgactatcgctcatagaggtgcaagtggctatgcaccggaacatacgttgtatgcatatgataaaagtcataatgagttaggggcgtcgtatattgaattagacttacaacgtacgaaagatggacaacttgtagcaatgcatgacgaaaccgttgatcgtacaacaaccggtacaggtcgtgtcgaagactatacactcgcacaacttaaacaactagatgctgggtcatggtttaacaatgctcaccctgaatatgcgaaaccagaatataaaaatgctaaagtccctactctagatgaaattttatctcgatacggtacaaaggctaattattatattgaaactaaaaatcctaatgtatatccaggtatggaagaacaactacttgaaacgttaaaaaaacatcacatgttaactggtaactctttaaatcatggacatatattaattcaatctttctcagaagaaagtttacaaaaaatgcaccaattagattcaagcgtaccattgattcaattacttgataaaaatgaattgcaacaacaaagtgaagcggatttaaaacatattcgctcatatgctataggtgtcggcccagattatactagtttaaacgctgaaaacactaagcatttaaaagatttaggtttcctaattcatccttatacagtagataaaactacagatatgcaacgtttaaaccaatatggtgttgacggtctatttacaaattttgctgataaatataaagctaccattccaaacgagtaattttattaattaaaaacctctcaatgacgagtaatatatttctcatcattgagaggttcatttttaatagttatatttacgcccatccacgataacgtgctgcttcagcggtccgtttaattcctacgatataagctgccaatctcatatcaatttttctattttgtgctaattcataaatagtatcaaaagcctcgattaatttttcccgtaatttttcatttacttcatcttctgaccagtaataaccttggttattttgtacccattcaaaataagatactgtcacgccacctgcacttgctaatacatctggtacaagtaaaatatcacgttcagttaaaatacgtgtagcttctggagtagttggtccatttgccgcttccacaacaatatcagctttaatatcgtgtgcattatcttctgtgatttgatttgaaattgcagccggtactaaaatatcacaatcaagttcgaataattctttatttgaaattgtatcttcaaataagttagttacagtaccaaagctatcacgacgatctagtaagtaatcgatatctaagccattaggatcatgtaatgcaccatacgcgtctgaaattccaactactttagcgcccatatcatttaaaaatttagctaagaaacttccagcgttcccaaagccttgaatcacaatacgtgaccctttaatttcttttcctctacgcttagcagcttgttcaatagcaatcactacgccaagagcagtagaacgatcacgtccttgtgagccacctaagacaattggcttaccagtaataaaacctggagaattaaacttatctaaagcactatattcatccatcatccaagccataatttgagaatttgtaaacacatctggagcaggaatatctttagttggtcctacaaattgagaaatcgcacgtacatatcctcgtgataaacgttctacttcatgaatactcatttgacgtggatcacatacaataccacctttacctccaccataaggtaagttgacaatgccacattttaaggtcatccacattgataaagctttgacttcttcttcatctacatcaggatggaaacgaacgccacctttagtaggtcctacagcgtcattatgttgtgcgcgatatccagtaaatgttttaactgtaccatcgtccatacgtactggaatacgtacttgcaagaatcttaatggttctttaattaaatcatacataccatcatcaaatcccaatttatgcaatgcttctttaatgatgttttgtgtagaagtcactaaattattattctcagtcataatcactttcgcctctttttttcacaaatgttttcgctttcataagtattgtaacacgcctatactttttaaagaaattaaatcatgccctattacgtctatttactcaaatacacttctaattcgatttaatgcttcatctatttcttctttagtaataatcaaaggtggtgcaaaacgaattactgtatcatgggtttctttacatattaaacctttttctttcaacgcttcacaaaatggtcttgcactttcgtgtaattccataccaatgaataacccgcgtccacgaacttctttaattgcagggtgattaatcttttgtaattctgttttaaaatattcacctagttcatttgaatgttctggtaaattttcatcaataatgacatctaaagccgcaattgacactgcacaagcaagcggattgccaccaaaagtagaaccatgagaaccaggtgtaaatacatcaagcacctcattatctgctaatacaactgaaattggtaagacgcctccaccaagtgctttccccaaaatatatacatctggcttaacattatcccaatcacatgcaaataattttccagttcgtcctaatccagcttgaatttcatcagcgataaacaaaatattatgttcatcacataaatctctaatggttttcaaataaccttctggaggaatattaatacctgcttcgccttgaataggttcaactaaaacagctgctgtattttcattaattgcttcttttaattgtgcttcattaccaaagtcaactttacgaaaaccctctagtaaaggaccatatccacgttgatactcagcttcggatgataaagacacaggggccattgtacgaccatggaagttcccattaaatgcaataatctcagcttgatttggttcaatacctttaacgtcataggcccaacgacgcgcagcttttaatgctgtttcaactgcttcagcacctgtattcattggtagtgctttatctttaccagctaatttacaaattttttcgtaccattcccctaagttatcactatgaaaagcacgagagacaagtgtcactctatcagcttgatgttttaatgcttgaataatttttggatgacgatgaccttggttaactgctgaatatgccgataacatatctatatatttattaccttctggatcagtaacccaaattccctctgcttctgaaacaacaattggtagcggcacatagttatgagcaccgtaatggtttgttagttcaataattttttcagatttagtcataatatctcccctttgcttattgttatattaaaactaatcactatatttactggctttcgaaactctattttaaaatattaaattctctctaactccataaatgaaagcccttacaaacataatgacatatccccttgacattttacaagtaaattatttctattatctaaaattttgatataaacttttttctcttaataaaaaaaggtagtggacaaaattcataatgaattctgtctcactaccaaactatttcatattttattaattatttatctttacgaggtaacggataaaatcctttattaaattgttcccataaatttggtggtaacgcatgtttatcttcacgatttggatcaaagtatgagatgatttcctcttctttaccctcttcaattttattgacaaagttataatctagaagaatgccacgacctaatgctacgagttcaatacctgtcgattctactgcatctaaagcatcatcagcactaaatacagaacctataccaataactggtatacgtccatctacccattgatggataagttttagacgttcttctccttcatatttaccctcacgtgtttgtgaatgaatatccataattgaaatatgaacataatcaatcgcttttttcgtaattgttttaattaatttttctgtgtgttccattgaaataccaggcgattctgcttcttctggtgataatctataacctacaataaaatctttatttgcataagtttccttaacttttaatacttcatcaatcactgcaagtgggaattttaaatggtctccccattcatcttcacgacgattatagtatggagagaagaattgatgaattaagtaatggttcgctccatgtatttctacgccgtcaaacccagcttcaatggcacggcgtgtagcttcaccgaaatctttaattgtttgttcgatttcttcagtagtgatttctctcgcatgatgttcctgttgttgaccaaaacttttcattgaaacgggacttggtgccacaacatctccattaggagtcaattcaggtaaagcttgtgcaccaccatgatgaatttggactaatgcttttgcgccatttttcttcattgctgtcgctaagcgttttaaaccttggatatctgaatcgtgtgcgacagagggttggcctgggaaggctttaccaatatcatttacattacttgcagcattaattgcaagacctacatctttggcacgtttctcaatgtaagaaatttcgacatctgaaatggtaccatcatcatttgatgatgtatgtgttaaaggtgcaagtacaaagcgatttcttaatgatacaccgttttgtaatgtaacagtttcaaataattttttatatttattattcataagtaattcctttctaaatcttttagtttttttattttcaaactataacatgaacatttttatgtctctacttttatgcttatatgcattaatcatctttttatatttagcaatatattgacataataaaaaacgttacttaaaaaagtaacgttttagcgtgttgacagtcattcaattattattacgaattgcacgtttagactgcttaatccagaccggtaggcgttcttcaagcgtttgaaacccatacttttctgtctctttaatttcatctaatacagactgtttttctttttttcgttcataattcttaaagtaatcattatctttaagtgacaaattaagctttccttcatcgtctatagaaagaattttagcttttacaatttgaccttctgatagaaatttttttagattatggacataatcatccataatctctgaaatatggataagtccttcagtatggtcaggggtctcaacaaaagcgccatacggttgaattccagtcacacgcactttaatatgctgaccttctttatagtgagtattcaacttgataaccccttatttcgttttttttaacatattaataatagcataaatcccatacttggactaatgataaactaataaaaaattaatttctttagaaatttatatttcttcttcctaaatttacattaaaaagttcgtttttaataaaaaaagatgagcgtaaatgtcttatttaaaacagtttatgctcacctatttttatttaatgatatttcattgacgagttaagcttttttgtcttctacatcaatcgattcaataacaacatcatgtacgggcttatcttgtgcccctactttagtatttgcaatatcctctaatgtagtttcaccatcgattaattgaccaaacacagtatgtttttgatctaaccaaggtgttccacctttgtctgcataagctttagcaattggttcaggccaaccgccatcaacaagctgattaagcattgtatctggtacttctttcatttgaacgacaaagaattgtgaaccatttgtatttggaccagcatttgccattgaaagtgcaccatataaattaaatgcttctaatgaaaactcatcctcaaatgaacctccataaatactttctcctcccataccagtagcagtaggatctccaccttgaatcataaaatcattaatgacacgatggaatgtaatgccgtcataatatccattttttgcatgtgtcacaaaattttcaactgtttttggagcaatctcaggaaatagtttaaatgtcatatctcctttatttgtatgcatgattactttaatttcattatcttgtatttctttatttaactgtggatagttagtcatttaaattctccattcatgttatgatgatatagatacataataacatatttgaaaggaagtaatatagcatgttatatcgattctctcataagacaggtgcctatggtgtaacgattaaagaagataacaatcatcaagttttagtacaaattgaacaagtcattaaacatcctaaacaaggagatttacatcatcctggtgaaactgaaggtgttttttttcatgaaagacgtgctttaagccattatgaaaaacgttatgcaacacgttcacaattgagagattttaatgtagaagaaatgaaatatgaagattctttacaacaagcgattactaaaatggaaaacgaattaaaacaacaacacacagaatacgcaaaattggcattagacaatttaaatagtctaaaaaaagactattctatccaatataaacaaaattttttctagtccattttacgtctttcttcctatttaacaagataagtaaaattgctgactttacatcttttcacagtttttcagaataaattgattcatgtataataaaatttataacaatttttgaaggaggaaaatatagtgagtttgatacatattgcggtacttttaccgttaatattcgcactcattattccaatcctttatcgtttctttaaaaagattcatttaggatggtttgtattacctgttcctgttgtcttatttatttattttttaacttatatttcaactactcagtcaggtaatacagtaataaaaactttcaattggatgccacatattggtatgaattttgatatttatcttgatggcttaagtatactctttagtttgcttataactggcattggaagtttagtagttctttattcaatcggttatttagataaatctgaacgattagggaatttttactgttatttattactgtttatgggtgcaatgttaggcgtcgtactctcagataacgtcattatcttatatctattctgggaattaacttcattctcaagttttttactcatttctttttggagagaaaagaaagcttctatatatggagcacaaaagtcactgattattactgtatttggaggacttagtttacttggcggattaatcttaatttcacttgcaggacaatcattaagtctacattatttaatccatcatgtatctcaaatacaagacagttctttctttacacttgcaatggttttaattatgttagcagctttcacaaaatctgcacaagtgccattttacatttggttacctgatgcaatggaggcacctactcctgtcagtgcatatttacattcagccacgatggttaaagcagggttatatcttgttgcacgtttaaccccattattcgcggtatcagaaggatggatatggactattactttagtaggcttaatcacactattttgggcttcattaaatgcaacgaaacaacaagatttgaaaggtattctagcgttttctacagtttcacaattgggaatgattatgtctatgctaggtattggagctataagttatcattttgaaggtagtgaaagtcaattatatatcgctggttttacagcagctgctttccacttaattaaccatgctacctttaaaggcgcattatttatgattacaggtgccattgatcatgtgacaggcacacgtgatgtaaaaaaactgggcggtttacttactatcatgccaatttcttttactcttactgtaattacagcattaagtatggcaggtgtgccaccatttaatggtttcttatcaaaagaaaaattcttagaggctatgatagaagctacacacgcacctctatttagtttaaatactctaggtattatttttccaattttagcgattgtaggtagtatatttacatttgtatattcaattaaattcgtactacatgtattctttggtaaatatcattctgatttattacctaaaaaagcacatgaagcatcattattaatgttaatttcaccagcaattctagcaacgctagttgttgtttttggactattccctggactattaacacattctataatcgaaccagctactaaagccataagtggaatatcaaccgtacatgcagaattccatatgttccatggtattactcctgcgttcatctctactttaacgatttggattgtaggtattatcttattatttacgttcaattactggattcgtttattaaaagcacaaccagacaacttaaaattaaattattggtatgatactactggcaaatggttaccaaatcattccgcttctctaactaattattatgttaatgggtatgtacgtgacagtttagtctttatttttggtacattaattgtgttaacactcatcacattagtgagtgtaccgtttagctttaattttaaaaatataaatacaattcacatctatgaaatgattattatcataatacttactatctcagcgttcttagttgttacagcaacatctcgtttatttagtattattatgcttagtgttgttggctatgcagtatcggttttatttgttttctttaaggcacctgatttagctttaacacaatttgttgttgagtctatctcaacgggtctatttctattatgtttctatcacttgcctaacttaaatcgctataatgaaaaaacatcatttaaattaacgaatgctatcatctctattggtgttggtttggcagtgacaatgttaggtcttatcgcttatggtaatagacatttttcttctatcggagagtattacaaggcacatgtttatgacttagcacatggtaaaaatatggttaacgttattctcgtagacttccgtggaatggataccttatttgaatcttctgtattaggtattgcaggtcttgcagtttacacgatgattaaattacgaagtaaacgtaacaaaacaagtgaggtggaaagcaatgaatagacaaaataacaatttaatgtttcagtattcagctgtaattattgctttcttaattgctctttttggtattactttatttttagcaggacattacacaccaggtggaggatttgttggtggattgcttctatcaaccgctttaaccattattatgattgcatttgatataaaaacaatgcgtaaaatctttccttgggattttaaaatcttaattggtattggtttattattctgtgtaagtacgcctatagcaagttggttttacggaaaaaatttctttacacatacagaatttaatattccattaccacttctacaccctgttcatatgaatacaccaatgttcttcgactttggcgttatgtgtgcagtaattggtacagtaatgactattattataacgattggagagaacgaatagtggaaattattatgattattgtatgtggcatacttacatcaatcagtgtctatctcgttttatctaaaagtttaatacgtattattatgggaactacgctgattacacatgcatcaaatttatttttaattactatgggaggattgaaacatggtgaaatgccaatatatgaaaaagatattcatcactatgtagatccaatccctcatgcattaatacttactgcaattgttattgcatttgcaactactgcttttttcttagtcttagcttttagaacgtacaaagaattaggcacagacaacatagaacaaatgaaaggagtgcctagtgatgatagcaactaatatggttgttcttacattagttataccaattattaccgctattattcttatctttttaggacaacgctatccattaaagcgtgcggttacattgataggtttagttttaactttgattgtagcgatggttaatttaattaatgttagtaaatttggtcctcttaaagtagaattaggttcttggccagccccatatggtattatctttttattagatacgttaggggcaatgttgattgtaacgagtattatcattactctgctcattacggtctattctttttcaactgccggaatcgatagagagcgttattattttcatttttcaatcgtctttatgttagtgggtattattggtgctttcactactggagatatttttaaccttttcgtattctttgaagtctttttaatgtcatcttatgcattgcttgtattaggtggtacacgtattcaacttcaagaaacagtaaaatatttactgattaatgttgtaacatcgacatttttcgttattgctgttggtatattatattcaattgtcggcactttaaatatggctgacattagcgtaaaacttaatgaattatctcattcacatcaaggattattaagtattgtctttattttgttcatctttgtgtttgcaactaaagctggtgtctttccattatatgtttggttacctggatcatactatgcgccaccttttgctatcattgcattctttggtgctttattaactaaagttggcgtctatgctattttaagaacacttagtcttttcttccataacacaatgagtttttctcactatactattttattcttagcactattaacgattatatttggatccattggtgccattgcttattatgatattaaaaaaattattttatataatattatgattgcagtaggtgtcatactcgttggtgttgctatgatgagtaaattaggaattatgggtgctatatattacaccattcacgatatgttagttaagagtgcacttttcttaattattggtgtcatgtatcaaattaccaaaacatcaaatcttaagtcattcggtggtttaattaagacatatcctatacttggttggtctttctttattgcagctttaagcttggctggtattcccccatttagtggattttatggaaaatactttattgtaaaagccgcttttgaaaaaggattttatatcagtgcaattatcgtattactttcaagtttaatcgtactctattctgtgattcgtattttcctacatggtttctttggtgaacctaagggatataaaatgaataacaaagtaaatgtaaaacaagctacaatcgtttcagtaattgccgttgtcattactgtactatttggtttatctgctgatgcactttatccatttatatcagaagctgctaaatctttctatgatcctaatgtttatattaaaagtgtattaggaggtagatactaatggctcttcaatttgtgttaaatattatattagctattatatggatgtttttaagtggcagttatacatttaataactttttactaggatttttaataggaattgggcttgtttacttatttaaaaaagtattgcctggtagtttttatttaaaaagagtttataaagtcattaaattgattattgtcttttttatagaattaatgaaagccaatattgatgtatccaaaattgtgttacagccaagacttaaaaatcaacctggcttctttatttatcacacagatttaaaacatgattggcaaattgttttattatctaatttaatcactttaacaccaggaactgtcgttttaggtattagtgatgatagaactaaaatatacattcactcaattgattttagtacgaaagaagaagaagttgaaagtattaaatcatcacttgaaaaagtagtgagagaggtgggcgaagcttaatggtaaaaacaattattattattgctttaattgtcgtagtattatcgatgctagcaatgtttattcgtattattaaaggtcccactttacctgatcgcgtccttgcattagacgctattggcttacaattgatggcgtgtgttgcattatatagtgtgtttatcggctcacaatacttacttgtagttattttacttattggtattttagctttcttaggtacagcagtattctctaaatttatagataaaggtaaggtgattgaacgtgatagcaaaaatcgtcattagtttagccatcattttcattatcttaggtgcattgatcagtgcaattactgctattggtattattcgtttaaaagatgtctattcacgcggtcatgctgcaggtaaatctgcaacattaggtgctatatttttattatttggaacgtttttatattttattggaacagaaggatacgccaatatgcaactgatattcggcattattttcattttaattactggccctctttctagtcatttaatgatgaaagcatcatataataataaaacgccttatactaaagatacaaaaattgatgaacttaaagatgaatttaataataaaaaaatataatttgataaaaatcgaggtactttcttaaagtgcttcgattttttgttttgaaaaagatagttttatgttattataaatcgtaataattacgttttgaaggagttttattatgcattggactattattggtggcggtatacaaggaaccactatagcaattaagttacgtgaagcaggaatatccatccaaaatcttacaattatcgatcctcatgattctttatgcgaacaatttcataaatacacaaatagaattgatatgtcttacttacgttcacctattgtacatcatattcatcctgacccatttcatttaaaaaaatttgcaaaaatgaatcagtatattaatccaacttttgatcgttatcaaagacctcaaacagagatgtttatggatcacacatatgctcaaatacataactatcatctaaatcaatgtcatattcaaagttatgttcaacgcattgaaaaaaaacaaagaaaatggagtattacaacaagtcatcattctgtcattcaaactgattgtgttgttttagcacaaggatgtcataatgagccttttatcccttccgcatttactcaagctaaagacgtatgtcatatatttagtgaccattttaattctcaattattttcacaatcatctcatgtcattggaagtggtatttcagctgctcatttaacattaaagcttttaaaattagataaaaataaaatcgttcatttatggatgaataaaaatatagatattcaacattttgatgccgatcctggttggctaggtcctaaaaaaatgaaggcctttttaaatcattcttcacatgaagagaaacttcaaacagtgttaaaagaaagacataaaggttcaatgcctcgcgagttatatttacgcttaaagaaatatgttcaaaataaaagacttatcatccataaagaagagattaaggacttaaaatcgcatcaaattgttactgaaaatttaaatatcccatatgattacattcttttagcaactggatttaagtcttcaattttgcagcaacccatgatacaatctctaattcaaaatgctaacgcccccctcctatcttgtggatttccaaacatcacacatgaattagaatggttacctcatttatttgttgctggtggactagctgatttagaacttggtccatttgctagaaatatcatgggaggtaaagaagcagctcaaagaatttatagcgtatttcaaagaatagatcaccatagagaagtatcataaatataaaatactagcccgtagatgaatatttctacgggctagtattttataatttgttattttaatggtttaatccctattgtacctctcatgatactaattaatttatcttgctcacttttaatttcaatattccatacttgtgtcgtatgacctttatgaataatagaagcggtagcaatcacgcgtccctcttttactgagtgaatatgattggcattcatttctaaacctaatgggataaagtgtttcgtatcaattaaatgagcagcgcctaatgaacaagctgtttcacctaatgcaatacttgcaccaccatgtagatagccaaagggttgtttaaccttatcagtgactggcatagaaattacaactattccctcatctactgtttcgatttccatatcaaatgtttcaagtaaattagacatgttgtcacctctttttttctataataccattgcagctattgtaccaaaaatcatcaatggaacattatagaaaaggaagttaggtatacatgtatctctaatgtgatcatgttgaccatctacattaagacctgctgtgggtccaagtgttgaatcacttgctggtgaaccagaatctccaagtgcagcagctgttcctactaaagcaattaatgccatattatctaaaccaagagatgaacctagtggtataaataaagctgcaataattggaatcgtagcaaaagatgatccaatgcctaacgtaacaataaggccgacaatatacattgcaataatagtaattaacttatgtccatttgtaatctcagttaaactagaaactaatttttcaatatcaccagtagcattcatgacaccggcaaaaccgttagctgataaaataacgacaccaataaatgacattatttttattccttctacaaattggctatctaattcattccatttataaataccagaaataaagaatatcagcactcctgctaatgctccaaaaatcattgaatccgtaaatgtttgaactaagaaagtagcgaaaatagcaacaatcgtaataactaatacatatggccgaatttctgctacttcttctccattatctttcaatctctcttgcttatattcacgtggtttacgataaacaaacaatccaataactaaaccgacaatataaccaagtgaaggaattaacattgctttccaaatcatattaaattcgataggatgatgcgctttttgaaatccgctttgtataatttggtggaaaatctgtccaaagccataaggtagtaaaacatatggccaacataaaccaaatcctataactaaaccaattaatcgtctatcaattttcagatcgttaaatagactaagtaatggtggaattacaattggtataaatgcaatatgtactggaattaagttctgactcataatactcattgctagtaatactaaaataataatcacttttactttaatccttgataagcgactattctcagtatgaattgcacgaataattttatttactaaataatctgtgatgccactatacgatatcagtgctgcaaagccccctaataaagcgtaacttaatgccacttccgaaccatctacaatatttttaccgaatacactaattactttgtttaaactcatgccagatattagaccacctacaagtgaactaataaataaactaatgataacattcagccttaagagacataatataatcattaatattacagcaataactacagcattaaacattatactcacatcctttattactctaccgaactaaagtgtataattatgtgattaataatatcaagtagtcaggcggttgtcaacgcctaatataatagtattttaaaaatgttttaaaaaaataaacgtctaaggtatcaatttacctcagacatttatctattttgtctcaaaatgaatgtatattcatttctaatatctattctattttgattgtcgtaaccaattcactatggtcattatcatgcttcctgtcggacctttaggacctttatagttatctttattaatcgtcgcaggacctgcaatatcaaaatgaatatgtggcgtttgcccactaaaatgcgtaacgaaagctgcagcaaataaggctttaccttgtccatttgtatgattcactaaatcagcgacatctgtattacgaatcaattgttgttcagtttgagtaataggcaattcaaaagcgaattcatcaacttctctagcactttctaaaatgtgtttcatatcttcatctgcattcgaactaaataaagccgccttatcttctcctaatgccgctatagcagcacctgtaagagtagcaaaatcacatattaaacgtggttgaaattgatttgcataaaatacgccgtctcctaaaactaaacgaccttcagcatcgctatttaaaacttctactgtttcaccatttaaggcagtatatacatcatctggtttcatagcctgttgactaatcatattttctgcagagacaatgacacctacaatatttactggtaaagataatttagacgcagcatcaatcattcctacaacattagcagcaccacacatatcaaatttcattgtttgcatccccattttagatttgatgctataaccaccagaatcatatgtaatccctttcccaactaatgcaataggcgcttcatttttatctgttccatgatacgttaaagtaataacaacaggagggtgagtggatcctttacctacagcatgtagtaaaccaaaaccttctgataacaatgtgtcattatttttaatatctactgaaacagaagacgatttaaagtgatgtgctactttatttgcaaagtattctggagtaagtatattgggaggcatattactaaagtcacgtgctatattcaccgattcaccaattaaatatcctgcttttatattttttatatcctcatcactattagatgattctatatataattccagttgatatggtgtggatttgttagatttatagttgttaaattcataaatcgattgtctactttgtaatccaaaaatctctgcaatacttgttttgtcaattttttttgaattaaatgtctcaaaaagaacattggcttctgtaacacgttctttttttagatattgaaaaagtgtaccaaacacttttaaaaatgaagcataagataatgttttcaaatttcctagtccaaccgtaattaaacgtttaggttcattatttatgtataaaatagtcgaagatgtttttcctaattgactacttacaatatgacgatgtcggtcattttcaatagtttgtgtaaggtcactattttgatacgtgatctttccaatttgattaagatgatcgggtactcctagaataataacgtcggtcattttattcgaatcataattaaaatgtatcatataactctcctttaaaataaaggagtgagatattgaaatctattttgcttcacagatttctgtctcactccttaatgattaaatatttaatttattaacttagaatttaccttttttaaatgctaagccaacgccacccattttgaatacagcacgtgtatcaatcacttttttcatgaacgcagcttttttaccagtaatgtctctaccaaacacatgacctacaccatcatgtgaacctaaagaacaaactgtaccacgatcaatatattcgaaatcagttgtagcttggccatttaagatattttcaatatttttagcaacatgcgcaccttgttgcatagcaatttgagcagttgttggtaatggacgttcctcacctgctgggataaacgcagaaacatcaccaataacgaagatatcatcatgaccatcgattgttaaatcttgtttagttacgatacgaccacgttttacaccttcgaatgattcttccataagttgactaccgcgaactccagcagcccacactgcagtattggcttcaagttgttgttcttgatcatttgttttgactttgaaacctttttcattacaagcaacgattggcgtaccaattttaaattcaacgccacgttcttctaaataatttactacataatttacaagattttctgagaacattggtaaaattttaggcatagcttcaacacatgtaattctaactttattttgatctacgccatatttattacataattcaggaattctatctgttaattcacctaagaattcaatacctgtaaatccagcgccacctactaaaattgctaaatcattttcatctttctcttttgatgcagcgtagttagcaaatttatcttcaatatgacgagataattcgcgagcagtatgaatattttcaatttggaatgcatgttctttcattccgttaataccgaatgtttcactttcaaatcctaaagcaacaactaaaatatcatattcaaaaataccgtgagtagtttctacttttttagcatttctatcaattttagttacttctgcattaatgaagttgactttatttttgtcaattacactttcaattggataaattaaatcttcataatttaacgtaccagctgacgcttcgtgtaaccaagttgcttcataatgatatttgtttttgttaactaaagtgatttctgcttcatttgcagatatttctttttgtaatttagtaactgcttgtaaacctgcatatcctgcgcctaatacaagtacttttttacgattttgtgccatttcattcacctaagctttcgtattttttcttaaatgtagataaaggctacaagtttcagaacatgttgaaacatagcatttttataatacaatagtattgtaaaaatgctaattgtttcgaaaaactttgaacttaacctatttgttcatccccatttatagtcttagtcaacacttttatatccattttgtaaacatttattcacaaaaaagacaaaatttaatccacttccaattttatagtttttatattatattttcaagcaacaacagaacgattatttaaatttattattactatattgtattaacttaagaatatgaaacttaacaattttcaggatgtccagctacttttgctgttctaaaagaactgccgcatccgcatgatgcaattgcatttggattgtcgatttggaacccaccacccattagtgattgtttaaaatcaattttagtgccattcagtacgggagcatcatctttatctactaaaacttttaatccataatattctaatacttcatcatttgatcctggagcttcttctgcagacataccatatgttaaacctgtacatccgccaccattcactttaatttttaaataaccgttttccatatgattacttttcaacatgtcttttacttcataagctgctgcttcagtaagtgttactgttggcatttctaatcactcctataataagtttgtaaaatcattttcttctatgtgtttataaatattgtttaacaaatcttcaggtgtatccccttctacgacttctccatctaccaatgcatataacccagaagaacataaaccacaattattgagacatccatattctaacacatctacttcaggatcactttcaagtttatcgtaaacgtagtctccgcctttggccatattcgatatacagaattcgactaatggaaacatacttcaccttctttttaatttaattacattattataacaaatctctttatatgttgcattgctatggtttttaactatttgtattttacaataacattttacattcatttgtcgttattattaaaaacatatataataaaattatattaatctttcatttatttgttaggggacaataaatgaaaaataagcgttaaaataggctgaatcacttaatattgaacctatactttatttatacaatctgaaattataaaggtctgacattcataatacatagccaattgattttaatgtaaaggggtaacataatatgaaaaatttagttctacttggtggaggatatggtaatatgcgtattatgtcgcgcattcttccagatgttcttcctcaagaatacacattaactcttatagatcgaatgccgtttcatggtttaaaacctgaattctatgcactcgctgcaggcacaaaatctgatagtgatgtgcgaatgaattttcctaattcacatcgtgtaaatacaatttatggagaaataagtgatattgacttagataaccaaattatttcggtaggacaaactaaagtagattataatgagttgattatcggactaggttgtgaagataaatatcataatgttctaggagctaaagaatacactcatagtattcaaacgctttctaaagcccgtgaaacgtttcatagtattagcgagctacctaaaggagcgcgtgttggaattgtaggagctggtttgagtggtattgaattagcaagtgaactacgtgaaagtcgcacagatttagaaattattttatatgatcgtggacctcgtatattaagaaattttccagaaaaattaagtaattatattgcgaagtggttccgcgaaaataatgtaaacgtggttcctaattcattgattgataaagttgagcaaggaacaatttataataatggtacaccagaacctgttgatattgtagtatggacagcaggtattcaacccgttgaaattgtaaggaaactgcctattgatactaataaaagtggtcgcgttatcgttaatcaatatcatcaagtaccgacttataaaaatgtttatgtagttggagattgcgcagctttaccacatgcgccaagtgctcaattagcagaagtacagggggatcaaattgccgatgtactaaaaaaacaatggaatcatgaaccacttcctgaaaaaatgcctgaattaaaagttcaaggtttcttaggttctctaggagagaaaaaagggtttgcctatattatggatcgtacagttacaggacgtttagcgcatatattaaaatcaggtgttttatggctatataaatatcataatggataaatacaactgggaagcgggacagaatttaatttcaattcatcatctcaagcttcccctcatttttataaaaaatcgaatactccactttgcattaattatttataatatattgatctataaaatgagtcactttttttgactgaatataaccgtcagccacatattcatcgttcattgtaataagcgggtaaaacaactcatcattttcaatttgctcaatatattgttgatcatgatcacttaaattttcagtttctttttgaaaatcgatatatgtatattcgaaatgaatattaggatattttctttctaataatggttttagccactcatacgtatttttagaagttggtgcattgacacaactagcacacactacatccgcaccgtaaacaacaacacttacttttgtcatatattaatcccccgtttagttttatagatttttctttctttatctattataataaattaataataagtttatgaagtattttacttgaaaggagacatatctcatgcctactgagaatgcaacaatgtttgatcaagtagccgaagttattgaacgtttacgtccgtttttattacgtgacggaggagattgtacattagtcgatgtagaagatggcatcgtaaaattacaattacatggtgcgtgtggaacatgcccaagctcaactattacattaaaagcaggtatagaacgtgctttacacgaagaagtaccaggcgttatagaagtagaacaagttttctaacgatataaattaaagacaccctacattcagtatttaatcagaatagggtgtcttttttcatttactatttagaatgagcttgataatcgttcatatgtttttcaatttgacgatccatgtatacccaacctttccaacctacatgtactacatcacttaatacatatttttcatagtctttatttgacatatcatacactttgccaccatgtccgacaacagttttatgtatttttttatagacaggttcacgtgttgaacggtgaatacctaaatgatcgtaccatttaccatttactggaagaataacatattgtacatcagcacctgcttgatgcattgtatctactagtaaagataaatccttaaactctggtgaattcattttaaattcatattggcgacgattcattggttttttatgcattagttttttccaatattcgttacggataccataaccattagaagtagaacgtttttcaccaagttgcactgctttattactcatgtttttccaagaatcattgggtgatgtaagtgagtgcacatgagttaatggtgatttatctaatgaaaagtatgtttttattgcctcaattttaagaagttgactttctttaaacttagaaatataacgaccttttgggttgcttggatcttttactaattcttttaaatattccttattaggaacacttctaaattttaataatcgtttagcatagcgttgttttaattctgaaggcatatccttttgttgaaatatctgattgatttgatttggtgtcgtacgtgcagccatatccatatcattaacgccatgtgtactaaaccattgtggtgaaatgataaatgtcatctttttacctttaagttgatcatattgacccgctaattcaatagcattaattaaatctgtattaccacccgtaccaactaagaatacaggctttgtattttttcgatgatgcattgctatcgcaggattaaacgggtcacgtttatttaactcacttgaaccataaagtggataatatttatcattactaaataattgattttgaatgagcgtacctttaagtacttgatcagttagtgacgttctattatcagcaagtgtcttattgttaacgagaccagtaaaccaactcgcaggcattaatacaaaagctaaaaatatgattccactaataagaattggtaaaaatggtttgaatttcatcgtaattcttctaaagcttcaacaattttattaggagttgcccattcatcgcgatcaaaatccataattgatacttcaattcctaatctattttgaatttctaataataatccaactgtttgaaatgaatcaataattccttcttcaaaaatctcaacatctgggttttctttaactacgtcattttctgctacatcagctaatacatctaaaacttgttctctaaattccatcatttatttctccctttaaattaattttcctgagaatattaagaagccaaatgctacaaaatggaatgtgataataacacttaatgctgtagcaaaaccattttgaaagcgaggtggatgtttctttctccagcgttcataatatccatatccgataaacattaaaccgtgataaataccatatacaatataaaatacttctaatccgtgccatacacccataataaagaaatttaagaagaaggcaaaatttgacattgcaaattgattcttcattatttttttacgagacatatagaacaatgttctcatataaacacagtctctaaaccagaatgataatgacatatgccatcgattccagaaatctttaatgttacgtgctttaaacggctgtttaaagtttggtggtgtattaatgccatatagataactcactgctattgcaaataaactataacctgcaaagtcaaaaaataagtaaaagctataggcatacatatataaccatttatgagtaaaaccatgtaaatgcattaataatggcataattgcatatacattaattaaatgagcaataatatatttatataagaagcccatcataatcatatgaatcgctttaactaccatacctctgtattgctcaccagttggtatttttttatcgtctttgacaaaacgtttataacggtcgatgggtcctgaagatactgttggaaagaatgaaataaattgaatcaatttccccactttaatttctttaatagaaccatctctaatttccattataagttgtacacttttaaaagtaacatatgagattcctaagaatccgacaaattcaattaacttatgttcatggaaatgtatttgatgtccacctaaccatgaactttgtaatattttaacaagtgctaaaggtaaaatagataaaatcataacaattaaaaatttaataaaagtattatttttttgtcgtgatttgtaataccacatgattaatagcacttgccatattaaataaattacaaaactgattaattgaacacttaaatatttctgtccaaataaattgtatgtatctgaagagaaaataatcacaatcataatcactgtacttatcccattgtatacatagcttcgcttacctaaaaatccgagtatgatgactggtaaaagaacgataaatgcgactaagaagaaggtaaacgtaccataaggaatcatgcgtcgatatcctctgcaacttgtttacgatcaagttttccatttgatgttaatggaagttgtttcatccaaacgaattttctcggaatcatatattcaggtaagcgagatttcaattcatttttaatgtttctagtcatctctaagtcattatcaacttttttagtaggtacaatagcacctacaagataaacaacttttccatttttataaattggcacaacaacagtttctctaacgtattttgagtgtcttagttgtgtttcaatttcttctagttccatgcgataaccgtttaactttatttgaaaatcgatacgtccttggataaaccaataaccatctttttcaatagctttatcacccgtgtgataaatgcgaacgccattatcaaacttaaatactgcttcagttttttctttgttttttagatatcctaaactcacacttgttcctttaataacaagttcaccttcatcagttgttgatagtgtagtattcggtcttgctacacctactggaagtggattataacgttctaaaatctcgggtgtgatttttacaccagtaactgcaactgtcgcttccgttggtccatatgtgttataaacaattgcatttggatatctatcaacaagtgctttagctgttctatgcggtaaaatttctccacaaaagaagaaatgatttaaacttggataatctttttcattaaggttaggaagtaataaacacatttctataaatgatggtgttgatacccaagcattaattggcgtttgaacaagcatttcatttaataacttcggtttttttatcatatctttatctactaagttaagtgttccaccagatgttaaacatggataaattgccattacagataaatcaaatgaaaatggtgcttggttcaaccactcctgatgattatctgtttcatttaatgagaccatccattctgcaaactctattaaactcgcatactcaatttgcacacctttaggctcacctgtagaaccagaagtgaatatagtataaacaacatctgttttatccatttgactatcaaaaacaataggataatcagaatgtttaatatcttcgattgtaagttctttccttggttgattcacacttgaatcagttgtatttaaaataaatgttggatctactttattcataatcatttctacacgttctattggaactgacgtatcaattgggacatagccacatcctgctttgattgctcctatcattccaactaccatatatggtgacatatgaccatagatgattaatggtttatttgtatcttgcaaataatgtgctagcttactagattcttctataagttgacgatacgttaactcatctgatttatgtctaatagctactcgatctggatttttttgtccaatatcattaattaaatttataatatctgtcatcctttgactccttactagaattcgttatatataaagttattatgtgtatcgcctgaaccatatataagatacaaagctataaaaattgctaagtatagaatagtcagtagatatggttttgctttttcataaaaaacacttatttttttagtttctttcaattgaatattgcacctcacaaacattgctatttattttgaagaacaattctacttattttatatttagtaaagttatcttactatcaagaaatattatatcgcacttttatttttacactttattatataaaaatattaattatatatcaaatttattttatataataattagtgagtgttaaatatgtatctatcttatccgatatgtccttattcttatctttgatattctatatattagtactaatggttacatatcacaattacacagagcataacaaaactgttagatataaaaacttcttattactcatatcatcaatttaagtaataagaagttatcatagaaattatttttattaattagtattactttctaattcagctatagccacattcaaatctttaaatgaataggttggctttggttgtttagtttgaatttcttcataagatgttacacctgtttgtacatgtaccgtatccatccccacattaataccagacatgatatctgtatcatacaaatctcccaccatagccacttcagacttatctagtttcaagatatctaaagcaatttgcatgattatggtttctggtttaccaataaattgtggctgttgtccagtagatacactaaccacacttgtaatagctccatttccaggtaagaagcctctttctttaggaattgagacatctggattcgtagagataaattttgcgcctttacgtactgctaaagtagctattgcaagtttttcatatgtgactgcttcatctaaaccgataactacgtaatctacattctcatcttcttttacggttaaacctgcatcggttaatgctgttcttaaaccattacctcctagcatatacacactagcttgactattttcttctgcaatgtaatttgccgtagctagagcagaagtaactacttcgtctggtttagcgtcaatcttcatttcttttaacttttctgttacttcttcaggcgtcttagtagagttattagtaacatataaatgaggaatatcgtttttgttcaaataatcgataaattgagcagcaccatcaatttctgctgtacccatatacattgttccatctaaatcgattaaataacctttataatttttcattatgaataatctccttttccaaaagcggtaattggcacattttctttttttagaaattgagtaacttctttcacaaattgtcgataatacggtattgaggtgtcaaataatggtacaagtgtttcaacttctaattctgtataatgatgtgcaaactgttttctgatttcaactgtatcattaatatggttttgtgtatctttggaaatcaccccttcaagttctaaaatatcaataacatctttatagttaccaggatctctcaaaataaaagcgtcaataatcatatttccaatatctactgatgattcaattaacatttgcgcaatacgttcaaatgcataatgatttgatttatttgtttcataatctttaataagctgatttaaatattttattttaagtgctaatttatctttatctacaaaatacatatcggtcacctcttattattattatcatatcatagttttgcatcatgcatcatttgtcgttatactaatttcacatattaaaaataaaggagcatgactgatatgatagatatgtttctgtacgatgatgaggaacaatcgcaagcacaatttgtaggatttgtaggtgaacatagtcgctatgatttaatgcttattcagaccgatcgtcattacggcaaaacactggtattaaatcttcaaactaataaatttggcatcataggcacagacgatattgaagaagaaggatatattgctcatatattaggtgtctctcaagaagaaagcgaagaaatcattgaatatctaaatcaagttattcaataaatgaaaggtcaaaacaatgtatattttgtgaatatcattgttttgacctttcattatttattattctttttttcagtagattgtgtagtttgtattgttggttttattttcacatcatgcaatttatcttctacttcatctacattagttaattctaatcgttcattctcattaatatgtctcactataaaatatggacaaccaaaattacaatattccaaaatataatcttggatggttgaaaaacgttttgaaatttcagcttttttatttgaatctttataaaatccttttaaacgtaattgatcataaccaaaatctccaactacaaaatcatatttatcaagtatatctgaatatcttgaagcaaataattcttcatcaaagcattctctataatcttcaattaattcaaaatactgttgattaactttaatcataataagtcacctttaattataattataataaaaacttagattgcctattttaaagaaaaagagcaatctaagttttagcatctacctattaataaacattcttaattgactttatgtactcatatcattgtttcataagataatatgacttcattatgtgatatcgcttaaaagaaagtttattttaaatttttgggttaatattatttttgttgtaactgttcttctccaagacggtgtttttcttttgccgcttcatttacttgttcatcagcatgataagaacttcgtaccattggaccagcttcacaatgtttaaatcctttttccattgcaatttttcttaatttaccaaattctaatggagtatagtatttttcaacttttaagtgtttacgtgatggttgtaaatactgaccaattgttaaaatatcaacatcatttgcacgtaagtcatccattgtttcataaatttcttccaatgtttcacctaaacctaccattaaacttgatttagttggaatatcaggttgtaactctttagaacgacgtaagaattctaatgttctgtcgtaagtcgcacgcgcacgaactcttggagttaagcgtcgtactgtttcaatgttatggtttaaaatatctggtcttgaagccattagtgtttcaagtgcttcataatccccacccatatctgacggtaaaatttcaattgtcgtatatggattacgttcacgtactttacgaactgtttctgcatatacattagaccctgcatctcttaaatcatcacgtgcaacagctgtgataacaacatgtttaagattcattagttctacagactctgcaacacgttctggttcatttaaatctagttcattaggtaagccagtttttactgcacagaaacgacaagctcttgtacataccgcacctaaaatcataaatgtagccgtacgtctagctccccaacattcatgtatatttggacattttgcttcttcacaaactgtatgtaaatttttctcacgcatcattttcttgaggccgatgtagttttcattagtgtttagctttattttcaaccaatctggtttacgtaaaatctcttcatttttagtagccataacaacacataccctcctgtttaatctatcttcaactattataacgaaatttacattaaattaaaatgtaataacttataaaattaagacataactatgaacatttgtgtactaagaagaatgatgcatatgaattaatttttctttaaagatatctcttaaaaattccggcattaaataatcaatcgatgttccttttaataatgggaaatatcttccaaatgtatacatatctacagttcctaatatataggtacggttatcttctatttcttgtccatctacaaagaagcgatgttctgattgaataaatccacatttatataatatataaccaccaaaaatatcgcctctaaatcctaacccttggacatgttcatacatatattcttgcttttgactttttaagattacctttttcaattcagaacctttcaaacgtacacgaactaagttgattggatgaggtaacatagtatggatatcgtattcagtaagttgatcgccctcgatactattaacgattaatccagcattaataattgtacaatctgcatttgtaaactcatacacactttctgcaagtaaataagtcgtttttgtaatcacatttgttttactagataaagaaactggcttattaataatcgccttattcatcaaatcttttccttcttcatcaaaatgtgttttaacgactggtaatgtgtctactggatgtaatgtagcctctttagtaattactgttttattttcaatcgttaaattcacttctccaagataatatccatatttccctgctgctgccataagtacaccattattgacttcaccatgattaaaatgatgatgtgtgtggcttcctagtattacgtctatctctgggatttcttgacataatttttcatcaaaaaagacacctacatgactcataactattaatacatcgtattgtcctttgcgttgttcaatttcgtctttgatggcttctaatgggtctgtcacaatccaatcaagtgctcgatagaatggcgtgaaaggtgccgtggctgctacaaataaaaagcgcacattctctatttcttttatataagatgtggcaatatgacgaggtaagtggccatcttcgtctaaaacattagcacatatgactttaaattgtgcatcattgtaaagattgtttaatgcttcatgagaaatagtcattccttcattattcccaattgtagcaatatcacaatgagcctcatttaaaagttcaacattctttttgcccatagttgcttctgttactggtgtagataaatcaacatgatcaccaatatctaaataaagtgaagggtgttgaagttcaggtcggtgttcagccatgtacgtcataatacgtgcatattcattaaggtggctatgaatgtcatttgtatgaaaaattgtaagcttcacttaaattcctcctgtttttttatagaaacgatttaataattagatatacacccataattaacattactgtgcgtaataataatactactgtttctgatttaatcgagtgatttatttttactccaatttgagcgccaatataactagaaatgattagaataattgaatatgaccaagcaacatgaccttgaataatatgaccaattgaactcattacacttgaaaagaaaatcatcatcatgcttgtccctactgctacatgaggtggaaatctaaatactataagcattaaaggagtcatcaacgctccaccaccaatcccaaataaacctgtaagtacacctataaataatgtagcaaagaaggcaaacataggtggaacgctataatgatatgtcatccctttagcatcgatgtatgttttacgatacttttccttatcgaatattttaaatggtttaatcttatgtctaatcatcaataaaatagatacacagatcataaaaataccaaagtataaattaaacgaatttaatgttaaatatctgcttaaaaatgaaccaataagtgaaccgggtaataatccaaataaaaatatagagccatttttaatatctacttgctttgttttcaaataaccaacagatgaagaaagtccagttacaataagaataaccgatgacgtaccaattgcaatctgagtagtgatgccgtgtaacagatgatggttcactcctaaatacactaaagtaggtacgataattataccgccaccaatacctactaaagaacctaatactgcagataataatccaattaaaactaataaaatcattgttaaaaacattataattcgcctcttagaaaaattttaattgctgaggtgctaagcctgtatactctatatctaaaatatcttgataggttttagcattttgagctgcatgaccaccagaattattattaaaaatgacatagacctttttagctttttgttctaatatttgaactttattcgctaaatcttttaattcattttcattataattatataaatatctaacatctcgccactcttgatctgtcatatcttttttagtccaaccatgctgatttctaccatgataacgcacaaaagcagtactagaagttatacgattgactaacggtatagacccatctttaatttgtggttcatctacgaccgcatgaataatttgatgttcggttaaaaacattaaagtttgttctttaaattgggaattaaaccaagattgatgtctaaattctacacacatggggatatcttctagctgttgtcgaacatacaaaatataatttatattttgagctgtacaatcaaaccaaggtggaaattgcacaagtaccattgctaatttatgatgtgcaatcagtggttcaagcatgtgtctaaattgtttaaatagttcagatcgtgaatcagcataagttttataatctgagtgaagcgtcaatgcttgatgaatcttaacgataaactgaaacttatctggtgtttcattgatccatttcaatatattacgttcaggttggatagcataatatgaggcatcaagttcaacaacaggaaaatgactcgcatacgtacgtaatttatctgtttgtctttcaagatcttcatataaagaataatgatctccccatccagttagaccgatattaatcatttttatcaccagatatatgataccacattcaaaattaatatatcacttgttgtatactaactttacattttcttattactttaaaatcgtcactataacaccctaagtgcgcgttaataactgattaatttgtaaaaataattaatctattaaatcattcacttttgattagtagctaaccggggatccactccaattatgggtaaattcactatctccatttgtaactacttgtcttctaatagattgtattaactgattttgaactggataagatggaatatcgccctcataattaatcattacttgaacaaattgactactacttcgggcatacttaccacttctgaatccgtattacctactatattggcttgaataattggttatttaatagtttagtcaaacaatgatcacactattgcattataaacatcaatatttgacttatcacctgttctatatatattaaatgtttacttctttttaatatacttgaaaaacaaaagaactagaatgttaaacattctagttcttttaactattagcttaagctatatcttaaattatccaattgaaccttccatttcaaatttaataagacggttcatttctacagcatactccattggtaattctttagtaaatggttcgatgaatcccataacaatcatctctgttgcttcttcttcagaaatccctctactcattagatagaataattgttcttcagatactttagaaactttcgcttcatgttctaatgaaatattatcattaaatacttcattatatggaattgtgtctgaagttgattcgttatctagaattaatgtatcgcattcgatatttgaacgcgcacctttagctttgcgtccaaagtgaacgataccgcgatagattactttaccaccgtttttagaaattgatttagatacgatagttgaagatgtatttggggctttatgaatcattttagcacctgcatcttgaacttgacctttacccgcaaatgcgatggataatgtactacctttcgcaccttcacctaataatacacagttagggtatttcattgttaacttagaacctaagttaccgtcaacccattccatattaccattttcatgaacaaacgtacgtttagtaactaagttatacacattgttagcccagttttggatagtagtataacgaacatgtgcatctttatgaacaataatttcaactactgctgagtgtaatgaacttgtagtatatactggtgcagtacaaccctcaacatagtttactgaagccccttcatcagcaataattaatgtacgttcgaattgacccatattttctgagttaattcggaagtacgcttgtaatggtgtatctaatttaacgtttttaggtacatagatgaatgaaccacctgaccatactgctgaatttaatgctgcgaatttattatcagctgctggaacaacagaagcaaagtattctttaaataagtcttcattttcacgtaaagcactgtctgtatctttaaagattatccctttttcttctaattctttttccatattatgatatacaacttctgattcatattgtgcagaaacaccagctaaatatttttgttctgcttctggtatacctaatttatcaaatgtacgtttaatttcttcaggtacttcatcccaagaacgttcagtatgctctgaaggcttaacataataagtaatgtcatcaaaattcaactctgataaatcgccaccccattgaggcattgggattttatagaatagttttaaagcttttaatcggaaattaagcatccattctggttcttctttcatcttagaaatttctctaacaatattttctgttagaccacgttctgatctgaaaatggaaacatcctcatcatggaaaccatatttataatctccaacatcaggtgcttttttagccatttcaatcactccttaaatatatttaaaacgatatgcgcatcatttatctttcactactatctatagtcattgtaacaacatgcaaactatataaaaagaaatatgtgtaaaatgtcacagcaccatagtgcttagaataacatttattacctattcgtattttattcttcagttgtaccttctgctttaccttctttttgcactgtacctttttctaaagctttccacgctaacgttgcacatttaatacgcgctgggaattgagaaacgccttgtaatgcttctacatctcccatatcttcagtgatgttataatcttcacctaacatcattttagtaaattcttgactcatttgcattgcttcacctaatgaatgacctttaactgcttcagtcatcatcgatgcacttgacattgaaattgagcaaccttcaccttcgaatttcgcctcttgaatgataccatcttcgatatcaaatgttagtctaatgcgatcaccacaagtaggattattcatatctactgtcattgatccattatctaaaacgcctttattacgaggattcttataatgatccataattacagatctataaagttgatctaaattattaaaactcatatgagaaaaactccttcgtttgtttcaatgcttctactaattggtcaacatcttctttagtattataaatataaaaacttgctcttgcagtagatgatacatttaaccatttcattaatggttgcgcacagtgatgtccagctctaacagcgacaccttcagtatctactgctgtagcaacatcatgtggatgaatatcagctaaattaaaagtgatcacacctgcacgtctttctttagggggaccatatatttctaatccttcaattgaagataattgctcatatgcatattctgttaattctttttcatgctgatgaatggcatcaaagcctatattttcgatataacgaatagcttcagccaatccaatagcttgagcaataatcggtgtaccagcttcaaatttagtaggtaagtcagcccatgttgcatcgtacttacttacaaaatcaatcatgtccccaccatactcaacaggttccatgttttgaagtagttcacgttttccatataatacaccaataccagtcggtcctaacattttgtgaccgctaaagctaaagaaatcaacatctaaatcttgaacatcgatatccatatgaggtgcagattgtgctccatcaacactaataatagcaccgtgttcatgcgcaatcttagcaattgcttttatatcattaatggtacctaagacattagacacatgagtaatagctacaatcttagtattgtcattaattgtcgatttgacatcttcgattcttagttcaccatcatcagtcataggaataaattttaaagtagctttttttcgtttagctagctgttgccaaggcacaatattagcatgatgttccatctctgtcacaacgatttcgtcgccttcgttaatattagcatctccataactatgtgcaacaatattaattgaagcagtcgtacctctagtaaaaataatttcttcaaaatatttagcattaatgaaacgtcgtactgtctcacgagcactttcatatccatctgttgctaaagaacctagagtatgcacaccacgatgcacattagaattgtaacgtttataataatcatctaatacatttaatacttgcactggtgtttgacttgttgctgttgaatcaagataagctaatcgttttccattaactttttgatttagtataggaaagtcttcaataatttcttgtatgtttaatgaagtttcggccactaccttcacgacctttcttttattgaaaatctcaatgacttatttatttactttaagttcgatgacttctcgtaattgacgtttcacatcttcaattggtaattcacggacaactggatctaagaaaccatgaataacaagacgttctgcttctttttgagaaataccacggctcattaagtagtaaagttgttctgggtcaacacgaccaaccgaagctgcatgacctgcttcaacatcatcttcatcgataagtagaatagggttcgcatctccgcgagcatgctctgaaagcattaacacacgagattcttgatttgcgatagattttgtaccgccatgcttaatatatccaataccgttaaatacagatgaagcattttcacgcattacaccatgttttaagatataaccatttgtttccttaccatattgaacgattttagatgttaagttaattttttgatcaccagtaccaacaatgactgattttagttcacttgttgaacgatcaccaattaagttagtagtattatcaataatttggcttccctcattcattaaacctaaagcccaattaattgatgcatctgctgccgtcacaccacgacggataatgtgacctgtaaatcctttatctagatagtcaactgaaccataagtaatgtttgaatttgctcctgcaatcacttcagaaataatattgacttgattaccttcaccacttgcagttgaaaggtaattctcaacatatgttacttcagcactttcttccgttacaataatagcatgattaaataaacttgcattctcattatcatgtaatactacatattgaatagggtcttcaactactacatttttagggacatatacaaatacgccaccattcaataatgctgtatgcaaagcagttaatcgatgttcatctactgtaactgcatctttcattaaatatttttctactaattcactatgatcttgtagcgcttttgataaaccttcaataataacattattatgatttgcttgttctgatacttgtgtgaaagctaaatcattattatgttgaataattaaatttttagaattttctatatcaataatatttttaactgattcaggaagttctgatacatcattatatgatttactttctacatgatgttgtttaaatgcatcgaaatcccattttcttagttttgttttatctggtttaggcatttctaaagtttctgttaatttcaaagctttttgacgtagttcagtcatccaagaaggttcattttgtgctttagaataatcaacaagttgtgcttcagaaatatttaaagtttctgttgtcataatgctttttcctcctacttgatgaaaaattttagtaactgaattgatatataaactgtttatttccacattttaaaatcaatcagttctttttatgaatagtttttatattatttaatgacctattcagttgcaccaaattcttctttaacccattcataaccttcttcttcaagacgtttagctaattctggaccgcctgattttacaactttaccgccatacataacatgtactttatcaggagtaatatagtttaataaacgttgatagtgtgtaatcattaatgcaccgaaatcttcaccacgcatttcattgattcctttagaaacgacttttaatgcatcaatatctaaacctgagtcaatttcatctaaaatcgcaaatttgggttctaacatcattaattgtaagatttcattacgttttttctccccacctgagaaaccttcatttaaataacgttgcgccatatctttatcaatatctaagaaatccatttgtttatctaattttttaataaattgcattaagttaatttcttgaccttcttcacgttttgcattaatcgctgaacgcataaagtctgcatttgttacaccagtaatttctgatggatattgcattgctaagaaaagacctgcttttgctctttcgtcaacctctaattctaaaatatttacgccatcaagtaatacttcaccttgagtgacttcataacttgggtgacccataattgcagaagataatgttgatttacctgtaccattaggtcccatgattgcgtgaacttcaccagtattaattgttaaattaacaccttttaaaatttctttatcttcaatagacacatgtaagtctttaatttccaatgttgatgacatttatattccctccataaaatataaagttttcttaactagtttatagtaattttaatttatagtcaaaaagacttctaacactttaatacacttaattataacgtaaatagtccccaatataaacttattaaaatgacaaaaaagattatattttcatcaaaattgtttcgaaatgacttcaattttcaagtgcgactgataatcaaaaggcatctgttctcaataggcatctatatattaacgatgattgactacttaatatttcaatgtaagttaaaaatttggtagtattcgtattaacttaataaagaaaggagacctttatgacattcaaatggaaaaatattttaaaaggatttgcgatgggaacttcagatttagttccaggaattagtggaggtaccattgctttacttttaggaatatatgatggttttatttcatccattagtggattattttctaaacgattttggccaagtctaaaatttttacttcctatattaataggaatgattttagcgattggtgtacttagtaatttaattcattacctactcgatcatcatcacgtaataacgatgttcttttttactggtttaattataggcattgtcccttacttattaaaaacttcagattttaaaaaaacatttacaactaaacactatggattattaattttaggaatcatagttatagtgacattaacgttattaaatcctagcacacagcaatcaagtttaacacttcaattatcttttagtcttattattaaatattttatagcaggtgtttgtgcttctagtgcaatgctacttccaggtatctctggctcatttatgctacttgtattcggtgcatatggaacaataatgttagctattgctaatttagctaaatttaactttaccggtctgcctatattaatagtagttggtttaggtattttatgtggatttctattttcaagccgtattataaaatactttttaacccaccactttattggaacatttgccttaattactggttttgttattggttcaatttatgctgtattcccaggaattcctaaatcaccagtagaatggattgtttcgattatttctttagtaataggatatatagtaagttattcattaggactgattacgtctaacaatgatactcagacataatattctaaaataaacaaaaaacgcatgtgtttaacacatgcgttctcttctagttaaaacgacttatttatcgccttttaatttatcaataacatcattcgctttatctttaacgttatcaaccacttctttagctttacctgaagctttgtcgccttgaccttctttttctaaatctttattatcagttgcattaccaactgtttctttaatgttacctttagcttgttcaaatttatcttctgccattttaaattcctccttgttgaacatttcattcttaaatgatttttgtaatattaacatacccaatacatatcatgtataaacataaattctgttgttttttatattttctgtctaattaaaataattgttataataacattgttcaatttacttatccaattggagatgataactatgacatttgttaattttactgctatgacagaaaaaggtttaaataaaaaggttaatgcattcttagaagaacatccatatatagaaattgttaaatttgaatatgcgatgggtcaaggtggtatcggcgttggaatactatatcaagacgattcaagtttataatataaatgactgcaataaatgtattgatataaaataaaaaaacggttcacatatttctttgtgaaccgttttttactgcatattattcattattttgcaggtacaactgcacctttgtatttttcattgatgaaatcacgaatgtctttagattgtaatacttcaactaaagctttaattttttcatcatctttatgatctttacgaactgcaattaggtttgcataagggttattattaggtttttcaactacaattgaatctttttgtggacttaagccttgatcaatagcatagtttgaattaataatagctgcatctacatcttgattttgataaattttcggaagatattcagctgattgtttgttattgaatttaatatcttttttgttttcagtaatatcttcaaatttagcgtcttcaatttttacgccttttttaattttaattaagccttcatcaacgaagaattttaagaaacgaccttgttcagctgggttatttgaaacataaactgtcgcacctttaggaaggtcttttaaacttttgtattttttagaataaacagccattggttctaaatgaactttacctgcatcttcaattttgtatcctttttctttactttcagtttttaaataaggaacgtgttggaagtagttagcatcaagttcacctttatctaacaacttattaggtgtagtgtaatcattgattgttttaatttctaaatcataaccctttttctcaagaagtggttttgctttttctaagatttcagcgtgtggtgctggtgaggcacctacaacgatttttttatctttttcgtctccacctttaccacaagcaactaatacaactgtcagtgtaagtactaatactaaacttaaaagttttttcatttaatctgtcctcttttctattatcgtttatcaattttatttgtaagccaatccccgatgaattggattataaatacaataattaaaataaatacggttgacactaaaatgacgtcgttttggttacgtgtaaaaccagttaagtaagctaaattacctaaaccacctgcaccaataacgcctgcaatagcagttgaaccaactaaagcgatagcagttactgtaatacctgaaacaagtgctggcattgcttctggaagcaatacttttcgaacgactgtccaagtattcgcacccatagaccatgctgcttcaataacgcctttatcgatttctttaaatgcgatttcaactaatcttgcgtagaacggtgcagcgccaatgattaatgctggaagtgctcccgtcggtccactaattgtacctaataatacacttgtgaacggaattaataacaaaattaaaataataaatggaattgcacggaacaagttaactataaatgaaactaccgtatagaaaattttagctccaggtgcgtcacttttagctgataagaaaagcagcacacctaagattaagccaaagataaaagcaaaaatggttgacactatagtcatataaagtgtttcatatattgcttgccaaacttcaggccattgcacgttaggcatagtaatcatttcatggaagatatcaccatatgatttatccatgtttaatcacctccacatttacgtgttgtttatgtaactcagttacaaatgtattaaatccatcttcactaatatgtggaatgtgtacaattaaaaatccaactgaacctgtacgtgtatttttaatatttgcttccaaaatgtttaattcaatcttctgcgttcgcgtaatttcagacacaacaggttgcgttgtattattaccgttgaaattcaatcttacaatatatgcgtctttgttcaatggttctagatgtttaattgaatcttcaaaatcgtcgtctaaatcgtctttcacgaatcgttttgtcacctcatgttgaggattttcaaatacttcatcaacattaccttgctcaataacacgtccattttccatcactgcaactgcatcacatatgcgtctaatcacttgcatttcatgtgtaataatcacaatcgttagatttctttcttcttttatttttaacagtaaatctaaaatttcatccgttgtttgtggatctagcgcacttgtagcctcgtcacataataagacattcggatcattcgctaatgcacgagcaatcccaactctttgtttttgaccacccgataattctgaaggataagctttttcacggccttttaaaccgaccaactctacaagttctaaagctcttttttttgcttctgtacgagctactccagctatttctagtgggaacataatattactaatgacagtacgtgaccataataaattaaaatgttggaaaatcatacttactttttgtcgtttttttctcaaatctgatttagaaagtttgttaatattgtctccatctataataatatcccctgaagtcggctcttctagattattaaacattcgaattaacgtacttttaccagcaccagagaacccaatcactccaaaaattgagcctgattctatattcaaatcaacgtgatctactgctagtacatctttgttctttgtgtgatagcgtttaacaacttgatttaactcaatcacgttaaatgcctcccttaaattccttatgtaattaaaaaatgctttcccacctagagagatgagaaagcatttaaaattatctttctctcatcttctaaagtcttaaactttatgtgaattggcaccatttccattatagacggttgccgggcttcgtagggcacatccctccacctctctcgataagagttttcgcactatttaattaatttatatcctatcactgtactaataattcgtcaatcatttttttaacttttctaacaaatatggcacggattgaaatgcatagattctatctacctctttatccttatccataattaacagtacaggtacagacataattttatattcttcactaaaatacttatggaaatttaaatcaatttttttaagtggtaattgttcgatatcatttgcaatatctagcatgcgctctgaaatcttacatgttccacacataggagtatatccaaatattaaatgtttatctttatcaaagtgttctttgatgtcttcgattttaatagaattattcattcacgagtactaacctttcagaacttaaattaggtataagttttttctctttttttacgttaaatccatatttactcaatacatgagcaagataatttttaggacaacgcgcgacttcacaatatgttttatctacatagatatgttcactttcacttaaataacgtttaaaccattttctaattttttcgccttcatcatctgaatcggcaagaatatagacctgttttccatataatgtttctatcatatcgtctagtttgtcgatactcattgtaccatgtgtacaaataatatttacaggttcagctatgacttgttgcactttcttcttatcagatttaccttcaacaatgataactttgtttaaaattgccatgttcatccaccttctaagtcgatattaaacaatcatttactttttcacgttattgatgaatataaacacaatttacagataattaatataatatataaaaaactcctagattcaatatcaaggagttttttaaaattattcgccaatcatttcagaatattgttcagctgatagcaattcatctaattgactttcatcatttaattcaacttttaccatccacgctttttcataaggtgattcattaacaaattctggactatcttctaattcgtcatttgtttcaacaattttaccagagacaggtgcatacaattcagatactgtctttactgattcaacactaccaaatgtatccccttcattaatttcatcatcgacatctggtaattcgacaaatacgatgtctcctaattcgccttgcgcgtattcagtaataccaattgttgccgtatttccttcaactttaacccattcatgttccttagaatatttgaattcgctcggtactgccacgaaaatcccctcctaaaaataattataatttaatgatgccataccgtaagttttcattcaactattaatattaaaagttgtgattatactttctataaccatacatctttatattgttcttcattaaaacctaatgtaactttttcacctgaaaccgctagcggacgttttaccaacattccatctgaggctaagagttctaatttttcatcattagataattcttttaatttatctttcaaaccaagttctctatatttcacaccatgtgtattaaagaatttatttatttccacttctgatttaactactaactctttgaattcttgttttgtaggtgtgtgttgcacaatatctatagactcataactcactccatgctcatctaaaaatcgagcagcttttttacaagttgtgcattttggatattgataaaatttaatcattcagtattatcctcctatttaaacttattataaatatatcaaattatttaaataaacgctctactttttaagctttatttttttctaaatattagtaattagttataatatataaaacaagctaaaaggagtgtaaagtatgaaaaatattactactactgaagaatttaattcagttattcaaagtgaacaacctgtaattgtaaaatttgaagctggttggtgtcctgattgtaaagcaatggatatgtggattgatccaatcgttgacaagtataacgactataaatggtattctgtaaatcgtgatgaattagaagatgtagcatcagacaatgaagtcatgggtatcccaagtttacttatatttgaaaatggtcaaaaacaagctcatttgcattctgctaatgcaaaatcacctgaacaagttgaatcattcttaaaagaaacatttaataaataattaaagaaccacactcgttattttgagtgtggtttctttagtattctgagattaaatgtttatttttacgttttgctttaggtggtacctcttctaaatcagtaagatacaataaacctgcaatagcttcatctttagcaataccaaacgcttttcttacttttggttcaaagatgtacaatggcgttttccaacatgtaccaatacctttttcataaagtaataacattagattctgagtgtatgcacccatcgcaaaaaagttttcgcgattttgtcgttgtcgtgggtcagttttaagtactaaaactaacatacctcctaaatttgtcaccgcgttataatgatcttcttgtttttctggactatttggaaaggcaaaacgtgtaatatctctactcatatctcctaatctatctttagaaacatgaataactctccacggttctctcataccatgattaggagcgtcagtagcttgttctatggctttaaatacatcttcatcattaatcaccatatcatgtttaaatttctttatacttcttcttaaagaaattacttcttgtaattccacaattatcgctcctctatattgataactattatcaattatacgcggatatcgatgacatttcaatgtatactacatgctttcgtaaaataataattgtttttttagttctttaacatgaatctgccctggcgcttgaggttcacctaagcaaccatatgacactgtacccccaaaaacaccttgagcagttcggctcactaatcctaaatgagacatagatattccaataacttgttgagaaatcgctttagatgtataagctactgcttctaatagcattgctacgtcctgtttttccttaggcattactgcaatttttacatactcaggatttaatttttgcattttataatatgtgaattttaattcttctaacggtggcgtttctaaaaaattatgataggacacaattatttgtttctgatgacgatgtgcattttctataatacgcttatgcgtctcaacctcaatatttgactcccattctatatctatcatttgacattcatctattgaggaaattgtttcaattaactgtaaatattctttattagttaactgaccttttccaccttgagaaattgtgcgatatgtcaccaatattttgaaatgattctttatttcatttagaagtgaaaggtttttcattaaaagttcgtgatgatgactctcccactgatctatacgcaactcaatgatatctatatatgcatgattatcattgatactatttaacgtttcattatctattatatcttgaggtgctatggttgcagctacctttacttctgccatataatcccttcttttcttgccatttacaattttatattattttaaactatttatgtcacactcgccaatgtttaaaattctttttaatttttacagatcatgatttaaaactttttagttgggtatataataattgtattcgaatttaggaggtaataataatggcagttcaatatgaaactaaagcaacaaacgttggtggacgtaaaggacacgtacacacagacgataatgcaataaatgtagatgtattaccaccacaacaagcagatggaaacgcaactaaccctgaacaattattcgcagctggctatgcttcatgcttcaatggtgcatatgaccttattttaaaacaaaacaaagttcgcggagcagaacctgaggtaactttaactgtacgattagaagatgatccaaatgctgaaagtccaaaattaagcgtatctattgatgcaaaagttaaaaatgtattatctcaagaagacgctgaaaaatatctacaagatgctcacgaattctgtccatattcaaaagcaactcgtggcaacatcgatgtagatttaaatgttcaagttgttgactaattagcattactctttaaaatcaaaattttataattttaaaaaaccctgagacacctcattatgtctcaggatttttttatgtgttgatagataaagactgaattaaaaagagctgatatcaagttatttcaatagtagtatgaaagttaacataatgactttcaataagaacatttacgtccttggggatgtattgctagaattgaacgacaaattcaaattgaattccgtcccactccatttcatttcctatctaacaattaagtttaaagatatcgatgtatgatagataatattctaacgtctatgtattctcacactttttgtataatttttaaaaataggctattctatggatatagttattaattaaactttataaaatttttataattcaattaatttgtataaatagatttttaaatgctaataataatttgaggtgagtataatgtcagaagttagaattcttactaacaacgatttaaatcaatatattactttaatatcaaatgattcacatacttattcatgggataaactttattttcaacatgtgtctccaaattacttaaaacacattctatctaaagaagaagagtattgtaatatttttggcaattttaaaaatgaaaaacttgtggctggtgttacattgcgacaactcaaacaagtgggcacacaacataaagcaatgttagaaaatctctttttaaaagacaaaaaagacgagattactttgcaaaatttaatctgtgaagtgattaattatgcaaagtctcgtcatattgaaaaactaatgacttgtattacctcaaatcatattggtgcaaagatttttttcactgcacttggttttgaaactttagggattgaaaaaaactcatttaaagtagatgatacttattttgatgttcattggctactctatgatattaaatagtcaggataatgattttacttattggcatcatcgattgtaggatccaccatatcgagaaattcaaactttccatgtgtataaataaattttaaaatacaacaatttccaatgatatattgatttgccatatcatcacctatccattttcttaaaaaaacctgaatggctgtaccatggcttaccgctaagaatgtttttccattagaggactctaataaattacttaatgtcgtaacgatacgatgttcaacttcatgtttcgtttctcctccgaaagagcgtagtctagttccaaaaatgtcgtgtttatcccaaactgcatccaataattgaacactatccccttcaaatagtccaaaactccattcttttaatcctttattacgttgatatgcttgttcaggtaaaacattttctaacgtatcacatgcccgttccgaactagatgaatatgcttcgtcaaaagtaatatgattatgtttaaagtaatgacctgcttgcttcgcttgagatattcctaattcagtaagtggagaatcacttgcaccttgtactttccctcttaaattaaacatagtttgtccatgtctcattaaatagagtattttactcattacattcacctcaatatattttttaaataatataggcaactttcttttacaccactttataatccatacatagtatatcttaattttttttatacttaaaaataaataaaggtaaaaaattaattaatacacgtttggttctcattgtgatgggtataatgaattataagttttacaaataaaggagcgttcattgtgaatgatcatcatcaatacaattatgtcaatcctaataagctctcattagattgggaatgttttgtaataagtaaatcagaaatgttacttgatggagttcctagtgaacttattcattcgtggttagatagagaaattatagaacctttttcaattagagataatgaattaaactttaaaactaaagatatatggaatgcgttaaagcaacaaaattggtactatcctaattcaaattaatttatagagactcattgctcgattagcgctttcaattagttggtgatcaacgtaatttgacatcacatatgctctaatttctttattattgcgttcgtttttgggaaatttatgatcatttacaatgtagtttgctaaacttcctagtggtgtatcgtcattaataaatccaataacaaaatcataaaatgtcatttttttcctcctcacattacaacatttcagtatctcctatcatcttattgtttctaaatgaatgatgtttatttatatataatcacatcagtaagttatattttttataagagttgtaatgttttaattgattttattaaaataattaaaacactttatttctaattattcactaaaaacattctatgcgaatattaattttctgtaaatgtgacgatttttcgaatctttatactcttttatttacttttttgatttccccttttaattgatacgtttattagttaatcatacatatttatgactgccgatgagtacattttagtttaatcgccggtttttttatgtaaatttacgaagtcattcttttaataaggattaaagttttacctttcttttaaagaagtgatatgatgataaaaaagacatcattgttatagaggtgacactacctatgaatattaataaattattttggattaatattatgattacccttttatttctaggttttaacattattgtcacctattttcctaagttagatgattatttctggctcatacctggtttaatcatatgtggtctcactatttcattcagtttaattgccgctatcttggataaaaaccttataagcgaaataatttttttaactaatctaatcatttttttatattatatatatccactgatatataactttttttaattaaaatgtgggaggtttacaaatgagtacacatttaacgattttactttggctgggtattatatttgttgttgctgcttcaattatattagggttattgctaaaatccaaaaaagaagaacgtaaagaatcatatttaggctttacagtcatcttctatatttttggttttgctttactgatatatatactattatttggtattttataaataggatttaaaagaacaaaatacgattttattttgttcttttttatatgtttctctataaaacgattaaggagatataaattgaagattattcaattgaaacgtattatatttgtgattttcattttattactatttttcgcgttctcttctcatacttatgcatctataagttccacttcttcatcttcagaaaaaggaaatgatttcaaattacaacctggtgatattattcttacaaaaggtccggtattatttggtttctttggacattcaagtattgctttagatcatgatactgttttacaaattgaaggacccggcgataagcctattactgaatctttcgaatcatttaaacagcgatttggcgttaaaaaaaatgattggattaaaatatatcgttgtgagtatcctaatgcaggtcaaaaagcagctaattgggcaaaatctcattataaaaatagtgataaaacttatttagttacacttaatttaaaaagtgaacgctttacatattgtactaaaattatctatcaagcatataaatacggtgtaagtaaagatacgataaatgatcatggtttactgattatctctccgtatgctttagttgataattttaataatgactatcgccttaagctagtcaaaaaatactaatagttaaagaatgtggcgttacactatacttttctatactaagaaatgatatttaaaggaccaacttatttttatgaaaaacaaaaaattacattatcgatttttttattatatgtttttaactcttattattatattatttattcttctctttctttacttttataaacattttgaattaaaacaaaatcaatccttagattactatgctaactttaatgatttaaaacaacatacaacaaaaaataaagattggaaaataatcacaaaacaccgtaagcacagcgataccttaattacagctattcatggtggaagtattgaacctggaaccactgaactcgctcgtcgtatttcaaatattggtcaatataatttttattcatttgaaggtctacgttcagataataatgctcaactacatattacttctactgtttttgatgaacctcaattattagatatgctcaaccattcgtcaaaaacaatatctattcacggatatgcaggcgatgaacccattgtttacgtaggtggtaaagataaaaaattagttcaaacattacgtcattcattaactcatcatggatttacagtacaaaaaacgcctaaaggaattgaggccctttcctataataatattattaatagagataaaaaagatacaggagtgcaactggaattgacgacccgccagcgagctttgttttttaaacataataaattggataaaaataatagacgatattcaaaaaattatacgagaacattttataaatttgccgaagcagtagatcaaggtattaaaaaagcgcaataaatgtaatatcgtttttttagttttttaattaaattaatttgggtatatataagtaatgagtttaggaggcgtttctatggacgagttaactaaagaacaaaaatatacagtagcaaaattttataagctatatatggaacgttcaaatagtggacaaacagaggaagaagcaaataattttaaagatagtattacagctcaagatgattatttttgcgatagaaaatatagtgatttcttagaaaattgcaaagttcttattgatcatggctatctagatggaaatattatgtctgatagaattgataatattaaagttacaaataaagcttttactgaaattgaacaaagctttaattaagaatatctaattttttcaagttatttctattcaagaatatttgcttaaaagtcttaaataaatatatttatttaattatgaatataacttttaaagcctgcacatatgtattgagtatgtttcaggctttttatttttaatagaggtgagtttacatgaatcattggaaaattaataatatgacgaatagaaatctacttatacaacaaaacgaaaatgatgtatctatagttgaacctttaaataacagttcatttaaaattctatcagagtttaaactgaatacaccctctcttcctattaatacatatgatgaacatttatatgtttcaatcaattttaaaaatgaagaaattaatatttacaataaatcgaatgaataacactattatattaataattttatcaactaaattgttttaaaaaaataataaaatgttaaataaatattaatatttattatgtaatatttatagtgaaatttgattgacatattgtaatgatggaggtcagttatggataaaattatattctatctaggcattactttatttttaatcgcttgtatagtcattatttttggtattattgctatttttaaaaataaaaattacttaaaaatgcttgctatggctattattattatcttattaagtatgcttgcactgggtattcataaagtcattgagagtaataatccctctaaaagtgacatcactcctataaaaaaagaaaagcctaaagataataaaacaaataaagaaaataacaataaaaaagaaaataattctaagaaaaataataaggatacatcacatgagtctattcaggatactccttccactcaagaaaacacacccgccacagaagaaaattcaattcagtcatcagaatcaccaactacacaacaatcaatacaacaagaaaacccaactactgaacaaaataatgcgactacaaataatcaaaattctacacaacgacagcaagaaccttcaacacaacaacaagacacatctcaatatcagacgaattcagcaaataatgattcaaaacaaacacattctactcacaaccagaatagtcaaaatagtactcaatataatcatacaaatgaatctaatacaacaaaagacaacactaataatgtaaatcaaaatagcacattaaatacaactcaaaatacacaaagtaataatacgaataataatataaaccaaataaacaattaataataaaaaaggtagagctttgaggctctatcttttatttttgacatcattttaaaatttataaatatttattgaatattacatttaatatgccatactaaaatatgatacgacttaaaacaaagggatgagacaatgaaaaaattagccttactaacgctttcaagctttctaatattaggtgcatgtagtcatagtaatgatacagtcaaagatgtaaacgaaagtgcacataaaaagaataatccaaaagcacacaaatccaaaggcaattctgaacgcatagatagtaaaaaaataaataaaaactaaaaataaggagtagaagcgctcttactatccatcgcttctactcctatttaattatcattcttcgtattgtttaaagtaatcttcgtctaaatggttaagatgaatattttcaatttgtagtgtaacatgttctaaattatatttttctttcaacaattcagaaactttattaaccgttgaatacggccatttagtatattcatcacttaaaacaacatgagcactcaatgaactatggtttgtagtgatgctccataaatgaaactcatgcacatctataacgccttcaacgcttttcattgcattaataatttcatctgaatcatatccatctggaatacgctccattaatactttccaagcatttttaattattttataaccaccatttaaaatgataagagaaatgatgatactaatgattggatcaataattgcccatccagtaaaatgaataagtactactgctacgataacgccaattgaatttaataaatctccgaaaaaatgccataatgcactttgaatattgacattatcttcttttcttaaagatctaaataaaataagtgttaaaatgatatttataataagacctaatacagctacaaatatcataataccacttgctaccggttcaggatgtatgattctcaaaatgccttcgtacataatacctaacgaaataacaattaatgctaaaccatttaagaaagctacaataatttctaatcttaaaaatccatacgtataatgtttcgttggaggcttacttgcaaaataaatagcaagcatagacaaccctagtgccaaaacatcacttaacatatggaatgaatctgataataaagcaagtgaattagcatataatccacctacaaactctacaattgtaaaaatcagcgtaataatcaaagaagaccaaagcgttgcttttgaactactttgaaatttcctatgttctacatgatgaaaatattttgattgattgttcattacttctctccaaacaattaaattataaactattttctttaaaactaccctaatatatattaaaaaaacctgcaaccaataaggttacaagctataagatggaggcggcgggattcgaacccgcgtccagaggtcctgatacaaatttttctacgtgtgtagtctattgattcatttcgcatattggtaagcaacagacaaccaacaatatgctagtttgattaaatttcatctaaacagacttcaaacggcagtgtttagcatatcctattagggttgaatcgcgttaacagcacataggaaatgctgttaggcgatgcagagtgctattacgcagctactgctaaattattgtttgatttgtcagttatatttaaccgaatgtgttgatgacggagacaaccctccgacacgcttaataagctcgggggacccctgtcgaatccaaaaacgcccccgcaatataataaaatataagatacagtttaatttaaacaactttacttatcataacaaatagagcccgattaagcaacaattatgcttaataacgggctttcattgcacgatcaacgtctcgtttcattgctttatctttcaatgcttgacgtttatcatgcagttttttaccacgagctatgcctaataaaactttacattgtccatgttttaaatacaattttaaaggaataatcgaatatccaatttctcttgtacgttcgcctagtttgataatctcttttttatgcaataacaactttcttgaccgtaatggatcatgattaaaacgatttccttcttcgtatggagcaatatgcatattattaatgtacatttctccacgcttcacttgtgcataactatcttttaagttcgcactaccacgtcgaatcgatttaatttctgtaccttgaagcacaatgcctgcttcaatggtatcttcaatattataatcatgtcttgctttacggttttcagccaatgtacctggtgattttgtttttttcttggccattaatgtatgtcacctctttgctgattattttttcttacgacgcgcttttttcttaatatgtttatctttataaaaaggtttatgcttagttgagctttgtttatcacgttgacgttgatttttacccttacgttgtttacgctttttctttttgtttttttgaagattatctttagatttatctaaagatttaccacgtgttttagcttgaatcgtttttccacgagcaggacgctgtgatttatcctttttaggtaatggcatgccaacaatttggaaatctatcatgcgttcatctacgtctacatgagtaactttaactgttacctcatcaccaattctaaacactttagcatgtcgttcacctatcaatgccatttgtcgttcatcaaattgataataatcatctgtcatattagaaatatgaaccataccttctatcgtatttggtaattcaatgaacataccaaaattggcaacagagcttacaataccttcaaattcatcgccaatatgttgaatcatatactctgctttcttcaactcatctgtatctctttctgcttcaattgcacgacgttcacgttgagatgtatgttctgctaattctggtaatgtttcttcccattgatgcatctctttatgattcatagagtgatcgacaagatacttacgaattaagcgatggacagttaaatctggataacgacgaatcggagaagtaaaatgtgtataatattctgctgacaagccaaaatgacctaaattcgtatcatcataatgtgcttgttgcattgaacgtaacatcattgttgaaataaccatttgctcagaacgaccttcaacttcttcttggatagattgtaatgttgaaggatgaatatcttcgcctgtgcctttaaccataataccaaaattagtaataaagtcgaagaactggcgtaatcgatctgattttggttgttcatgaacacgataaataaatggcacttctaatttgttaaaatgttcagcaactgtttcattggctgctaacataaatgattcaattaaacgctctccttcaccacgttctcgcaatattacatctgtaggtaggccttcttgattgaccaatactttagcttcattaatatcaaaatcaatttcaccacgacgtttacgcatacggacaagtcgattagataaatcttgtgctaaatctaacattggaacaatttcactgtattgttgacgcacttctgtatttttttcggtaataatttgattcactgcatcatacgtcatacgatagtttgaatgaataacactatcaaatatgtcatgattcaccacttcgccacgctcatttatttccatacgacaacttaacgttaaacgatctacttcgggatttaatgaacagataccattacttaaacggtgtggaatcattggaataacacggtctactaaatatacactcgttgctctatcataagcttctttatctagcgcagagccttcttttacgtaataacttacgtctgcaatacttactgtcaattccgtatgtccattatctagacgtttaacgctaattgcatcgtctaaatctttagcatctgcaccatctattgtaattgtaagatcgtttcttaaatctcttcgtcctttaatttcttcgggttttatttcttcagggactgattccgcttcttttaatacctcatcaggaaattcaatctcaattccatgctgatatataattgaaagaatatctactcctggatcatttttatgacctagaatagcagaaacatgtccttctggattatctgtgccatcagcatattttgtgatttggacaagtactttatgaccatctacggctccaagactctgtcctttaggtataaatatatcttgcataatacgtttatcatcaggaatgacaaaaccaaaatgttttgcttcactatacgtacctaccacttgtgtgacagaatgtttttctatagattttacttcaccttcaacttttccacgatgctctcctctggatttttgtaattcaactattactgtatctccatctaaagcacggttaatctttgttggtggaataaaaatatcttcaaattcttcgttttctgggcgtaaaaaagcaaagccttttttattttgacttaaagtacctcttattaattttgaacttaaattcttatttgatgctttacgttgatagcgatctgtctttgttcgctctaccaatcctacttgttcaagttcaacgagcacctttattaattctctaaatgagtcggcactactaagacctaaagcatcttgaaagtctgatacagacatcggttcataatcaggttgttttacaatttcttcaatggattgctttaaattcatcatgcccctcctttctttaatcaattatttttatgatttattcagaccagtctaatccttctaaaaactcatatacatcttcaaacacttgttctttttctttatcaattgtaatgacatgtcctgaatttgcataccatttaatttgtttttcatctgaatctacattttcatatatataatttgctgactgaggatcaatcatttcatctttttcagcttgaactactaatataggatctaagacttcatctacatcattacgcacacgacttaacgtatcactaagttctttgagtgtttcagtaggatgaaaatcttccatttctttatcaatcgttgcttgatctttaccttcatactttttaaaattacgtgcatattctaaaaaaccttcatagattgtaccttctgtttttacttcggcaggtgcacacattgttatgataccttttacaggacggtttaaacttaacttcaatgcaaatacaccgcctaatgacaatccagctaccgctatatcttcataaccttgttctacaagataatcatagccatcaagtacatctttaaaccatacatatggactagattttaatatctcttctggtggcgcagcatgcccttcatactgtggtgcataggaagtataaccctttttttgtaaaaatctaccaagttgtcttacatcagatgaattaccggtgaatccatgtaagagtaagactgctcttttaccttcttggaaaaagaaaggttgaggtaacttaatttgcattttttatccctctctaacaaaaattataatatgattacttttttattttgtactaatagattgtattcattatataatcaatctattttattcccttaatagcttaaaaatatgcattgatgatcatattaaaataatgatttcattataaaatgtgttaactctattataaataaaaaagcccgacattgatatcgtcggaccttataaaccaaaataacttattccaatcattattaaaaagaaaatgatggctaacacaattgttaatctatgcaagaataaatcgacgccacgttgtttttgcttaccaaataactgttcagcgcccccactaatcgcacccgaaagtccattacttttactttcttggagtaatacaacagtaattaatgcaatacaatcaataattaataagaccataaataatgtatgcatgaaaattgtcctccgttcattatatacgttccgaattataacatattcttaatatagttatcaaatactatcgattaaatgtacttttacgtacaattgaaataattaacatatatattgctaatattgctgaaccaatcacgacgattaaaataggtaaaataaataaaatagattttgtttcaataatagcatttaacaccatcgttaagttgacaagtgtaaataatacatttgatacatatacggcaaacataaaccaccaaagatatttatgtcgattccataaagcaattactccagctaaatatgcgagaatatacataatacctgtatatctaaaactatttaaaatgttatctactgcactgcttgatgcttcttgatgtgctagtgttaacagtgttttagcagtgtgagcatctaaagcaataaaattatggataattaataatatacaaaatacaagcgaactatatccaatccattgaccggcaatacgttctcttttatttgactgattaagttgttgatccatcttcaattctccttctttcaattacaggattattatatcagtttcatcaatgaagttaaatcttacacttcgaggctattatttaaaattttatattaaaaaaagcctgtcatagtctcaactctatgacaggcaaacgcgtgaactctattaattttagtatgttactaaaattatttatctaaattgtagaaagatttaattccgtcaaattttgctgtttcaaataattcatcttcaatacgtagtaattgattatatttcgcaatacgatctgttcttgataatgaaccagttttaatttgaccagcatttgttgctactgcgatatcagcaattgttgtatcttcagtttcaccagaacggtgagatactaccgcagtgtaaccagctttttgagccatttcaatagcatcaaatgtttcagttaatgtaccaatttggtttactttgattaagattgagttaccaataccttgttcaatacctctagaaagaatttcagtattagttacgaataaatcgtcacctactaattgaactttgtcaccgatacgatcagttaattgtttccaaccgtcccagtcattttcatccataccatcttcaattgtaatgattggatatttactaattaattcttctaagtagtcaacttgttcagctgcactacgtttcgcaccatgttcaccttcgaatttagtgtagtcatatacaccattttcatagaattcagatgacgcacagtcaaatcctaagaatacatcttcgcctggtttgtaaccagctttttcaatcgctttaatgattgtttcaactgcatcttcagtaccgtcaaatcttggagcaaaaccaccttcgtcacctacagcagtttctaatccgcgttcacttaaaattgattttaagttatggaaaatttcagcaccccaacgtaatgcttctttaaatgattcagcaccagttggtaaaatcatgaattcttggaatgcaattggtgcatctgagtgagaaccaccgttaacaatattcatcattggcactggtaattgtttaccgttaaatccaccgaaatatttgtataatggttgacctaataagtcagcagctgcacgtgcaacggcaatagacacacctaaaatagcgtttgcacctaatttacctttgttaggtgttccgtctaattgaatcatcattttatcaattgatacttgatctaaaactgaaaattcaccttcaacgatttctggagcgataatttcgtttacattttcaacagcttttgtaacacctttaccgctataacgtgatttatctccatcacgtaattcaactgcttcgtgttcaccagtagaagcacctgaaggtactaaagcacgaccaaaagcaccactttcagttaatacttcaacttcaactgttgggttaccacgtgaatctaatacttcgcgagcataaacatctgtaataattggcataataaataatctcctttaaatttagattccttaattattataactattttttgttatttaataaaatatttatactaagatgacttaatattaaagaataatattaaatcatcttagtatttacaactttactaatgcttaattaaagattcacctgtcatgtctgacggttgttcaacatttaataagtctagtaatgtaggtgctaagtcacctaaacgaccagtttcacgtaatgttacatcttctttagtaacaattactggaactgggtttgtagtatgagtagtcataggttgatcatcatcagttaaaacttgatctgagttaccatggtcagctgtaattattgcatagccattcatatctaaaattttatcaaccacttcacctaaacattcatctactgcttcaattgctttgattgttggttcaagcataccactatgacctaccatgtcagggttagcaaagtttaaaataattaaatctaaatcacctttgtctaactcttctaacaatgtatctttaacttcgtatgcactcatttcaggttttaaatcatacgtagcaactttaggtgaatcgattaagcgacgacgttcaccttcaaattcttcattacgtccaccactcatgaaataagtaacatgtgggtatttttcagtttctgcaatacgtaattgttttaaattattattttgagcaacttcaccaattgtattagttaaatcaactttttcaaatacgacttctgcatcaacattatcattatatttagtaaatgttgcatagaataaatcatttacacgctcaactttaaagccgtcaaatgctttatttgtaaatatttcagataattgtgctgctctatcaggacggaaattgaagaagataacagcatcaccatcttgaacaccttcattttgtccttcaactatgaaaggttcaacaaattcgtctgtaacgtcattttcataattcgcttctacaccttctttagcgctcgcataagaaggtccttcgaaattgcgaatagcattataagctttttcttcacgatcccaacgtttatcacgatccatagcgtaataacgacctgaaatcgatgcaaattgacctacaccaagttctttaaatttagcttctgtttcttcaatatatttaattgctgatttttgatctacatcacgaccatctaaaaatgcatgtacatacactttatctaaacctttttgtttagcaagttctaataatgcaaataaatgtttgtaatgactgtgaacaccgccatctgaaagtaaaccaaatacatgtaatgctgagtcgtgatctttaacgtgttgagctgctttacctaacacttcattttcgtagaaatcaccatcttcaatggatttattaatacgagttaaactttgatagacaatacgacctgcacctatattcatatgacctacttcagagttacccatttgaccttcgggaaggccaacatctaaaccacttgcttcaatttgagtcgtaggatatgtgttgtaataacgatcgaaattgggtttatgcgcttgttttactgcattaccatgttcactttcacggttagcaaaaccgtctaaaataattaatgctgttggttgtttagccataattatttagcaccttctaacaattgtacaaaatcatctactttaagtgatgcgccaccaactaatgcaccatcgatatctgattgagccatatattctttaacattatttggtttcacactaccaccatattgaataagagtcgcatcagctacatcttgactagacacgtctgctactgttttacgtacttgtgcacacatttcatttgcatcttctgaagtagctgatttaccagtaccgattgcccaaattggttcgtaagcaatgacaacttctttaagttgatcttctgacaagccttttactgcttcttttacttggttgcttactacttggttagctttgccattttctctttcttcatctgtttcaccaacacaaataattggtgtcattccatgattaaatactgcatgtgcttttttatttacatcttcatctgtttcatggaataattcacgacgttctgaatgtccaataacgacatatttaacacctaaatcagctaatgccactggagaagtttctcctgtatatgcaccattatcttcaaaataagtgttttgagcaccaatttttaatccttttgctttgccatcattcactagagagattaatgcatctaattgaattgttggcgcacaaattactgattcaacttccttttcatcaggtaatgtaggtaaattgtttacaaagtctttagcttcttgaactgttttattcattttccagttaccagctatgattggttttctcattattgacactcctattattaataaatttaaaattaattataaatatttacgttcttttattgttttcccatgaaaatcataaaagaaacatttttatgatttaaataaatattatttatcgttaattgctttgataccaggtaattctttaccttcaaggtattctaatgaagcaccgccaccagttgaaatatgagtgaaatcctcttcaaatcctagtgaaattgcagccgctgctgaatcaccgccaccgataattgtgattgcatcttctaagttagcaattgctttacatacaccaattgtacctttagcaaaattactaaattcaaatacacccataggtccgttccatactactgtatgagcaccttgtaattctttagtaaataactctattgtttttggtccaatatccattgcttcttgatcacttggaatttcatcaatagatacttcagtgattttagcatcgtttgaaaattctttagctactttacaatcaacaggtaatacaatttgatcgccatttttttctaaaagttctttagcaaagtcaattttatcttcttctaataaagatagaccaatttctttaccttgtgcttttaaaaatgtatatgccataccgccaccaataatgattttatcagcgatattcactaaatttttaataacatcaattttgtcagatactttagcaccacctaaaatagccacaactggtttatgcgggtcatttaccacaccaccaataaatttaatttctttttccattaggtaacctgcagctgtttctagatgagtagaaataccaacatttgaagcatgttcacggtgtgcagtaccaaatgcatcatttacaaacacatcacctaatgatgcccaatacttacctaattcaggatcatttttagattcttttttaccgtctaaatcttcaaaacgagtattttcaactaataatacatcgccttcatttaaatttttaattgcagattctaatttttcaccgcgtgtttctggaacaaacacaacttctttgcctaatttttcagttaatgaatctgctactggttttaaagttaactcttttttatcactttcttctttaactttacctaagtgagagaataataccaatttaccgccttgttctaaaatatatttaattgttggtaaagcttgaacaatacggttatcatttgtaatttcaccattttttaaaggtacattaaagtcagcacgttcaagtacaacttttccttttaagtctaaatcagaaacaattttttttgccattataatttcctcctttaaataggaattattaatataaaaataagcggagaagcgttagtgctccccgcttactcataagctaacttaattcaacattttatataagtgtactgagcacaagttttattaaactaggctacgaaattatttagttaattcagctaaatattctaaagtacgtactaattgagaagtataagacatttcgttgtcataccaagcagctactttaactaattgtttgtcgccaactgagatgacacgagtttgagttgcatcgaataatgaaccaaagttcataccaacaacatctgatgatacgatttcatcttcagtgtaaccgaatgattcgtcagcagcatttttcattgctttgttaacatcttcaactgttacttctttttctaatacaactgttacttcagttaatgaaccagtagctactggtacacgttgtgctccaccatctaatttaccatcgatttcaggaattactttaccgatagctttagctgcacctgttgagttaggtacgatgttttgtgctgctgcacgtgcacgacgtttgtcaccttttctgtgtggaccatcttgagtcatttggtcaccagtgtaagcatggatagttgtcattaaaccttcaacaataccaaattcgtcatttaaaactttagcaactggtgctaatgagtttgtagtacatgaagcacctgatactactgtttcagatccatctaagtctttgtggtttgtgttaaatacgatagttttaacatcacctttggctggagcagaaattaatacttttttagctcctgcattaatgtgtgcttcagctttttctttttctgtatagaaaccagtacattctaatactacgtcgatatctaaatcgccccatggtaatttacttgcatctggttcttcaaaagatttaacttctttaccatttacacggaaaccaccttcaactacttctacgtctccgttaaagcgaccttgcatagtgtcatattttaataaatgagctaacatttcgtcgtctgttaagtcgtttactgcaactacttcaataccttctacgtcttgaattcttctgaatgctaaacgaccaattctaccaaaaccattaattgctacttttactgccattataatggcctcctttaaaatgatatttaaaaagttaaataactttttattccttatttagtattactttagctgctgcttcatcagtaattaatattgtatttttgggggcaatactgagatatgctttgatagcttctcccttagacatgccgccagcaacagcatatataaaatctttgctttctaaatcttcaagttgtaatccaatagtttttactttttgaactacatgaccttgagcgtcaaaataatatccgaaagcttctccaacggcttgatgatgttgaagtctttcaatcacctcatcagatgattgtctacggtgcgccatcttcagcgcatcaccaataccgtgtattgttatatttgcttgtttaattttttctaatgtatgcacaactgatggttccatcagcaatgtattatatgttgattcgctaacattatctggtacatatagcgtggtataataaccaccactttgttgtgccatacttgctgcaattgtatttgcttgataaaccatattttcaccaagaccaccacgtgcaggaacaaaaaacacattaaatggtaataaatgcattgctcggctaacattagccattgttgatccacctgtcactgatacaattgcatcttcatacaatatatcttctagtaaatgacctgcttgtctactcatctcagacttaacttcttcatgcatgtcagcatttccaggtatgacatatacttctttaattccgaagttggacttaatatgtttagcgtagtgattatcatctttatacactttaaagtaatcacttaattgattaagtacttttgtaccttcttcagtgatttccataccagttgattttacttgtataagattttgcttttttaatatgtctgtttctgttcttaagactctttctgtaatatccatatgttcgcttaaacttctacgtccaacaggttcattatttgaaattgtcgttaagatagagaaacgtcgatacattttatcaactaagtcaggaaccaacttttgttgtagtttaatcaggtctttcactactaccttcctcctattttctcaaaaggtaatcgagagttagagggggtttgactttttttgtcccaggtgggacaaaattcaacctctttacaattgcaatactactattgtcgttataaaaaagcaagtgaaaacctttattattttaaataatctgttaaatatttaaaatagggtatagtaaatgcaatagagttaaccttatagataggtttttcaaaaatgatgaattataatttaaacattaactagataggaggaatcactttgaaatataaagacaataaggatgtagaagttttagatccttctgataatagatataaagatgatgactattttaaaagagaacaagaatatcgagatatttctgaacatcacaatacaatacgatatcactatggttgtggttgtccttttggttgtttctcttctatttttatatcgattgttctttcaattatcttaacattcttgcttaactggatattttaaaaaaacctagagatacacacatggtaaaatgtgtatatacctaggtctttttttattcttcgtttgaagatctttgagattgttgggtattactttttgattctgaagtagttgaactagatgattgtgttttaggttcggtagtagatggttgcatcgttgatttttgtgtttgggatgattgatttgtattagctcgttcttgtgtagtagttgtgtcattgttacttgacttatgttgtgatgtttcagttgaatccttagaacgagaagattgacttgactgagtgttttcatttgatttatctgtttcttcttgcgttgctttttcttgagttggtgcgttttctttttgttgagtttgtgagttttctttttgttgagtactttgaatttgatttgtattaggttgttttgtagatgtttctttagaagattgttgcgtttgtgctgttttaccttgattagtaggttgtacttttattgaattattttgctcattagaatagttatcagttacatttggattttttacgttatctaatttattttctttactattatttgtattgttttcacttgttgtattttcttgcgtactttcttcattctttttattacttttagtatctttatctttcttatctttatgttcttccgttgactgattatttaaacgttcattgactctgtttgaattatccacaaaagcaaaaactgcaaacaccaatccaccaagtaatagaagcacaataagtgtactaattattttagaaataccactcatttttttcttttcatgtgcttcatagtctttaagatttctatttttttttgacatggactccctcacttcttaattatctattcatcctttaatatagcaatctattttacattatttccttttaaaaaaatattaaaaatacttaagtacatatataaatggaatactcattcaattatacatgataacatcatatataaataactacactatcaatatgatgtaaattttggagtgacaaaatgaaaaaagatacttttaacacattattcaaacatcattcaagcaataaaattaaatctatgatgttaagtaatgatgattttgatgaaagtaaaaactcaaaatttgatatatttattggcattttaattcctataatcatattattcttaatcttatttataaagtaatataatagaaacttgaaagagaagagaatagaaagaaattaaaatgactcttgttttgtaaattagtatattaaaagtataaacatactttttaaatattctactattctctatagcaaagctatacttatattatagctaaatttaggtaatttaatgaccgtattttctaaagttaatgacataatcttgaatgctttttgagcatctttctctacattgtcattaaaaaaatttattttctttataaaaaatgaggtgttagtaaatgaaacaatttttaattactggtggaactggaatggtaggtagtcatttagtaaatgaaattaaaaaaagagaggctcatattacaattttaactcgtagtgataaacaaagtgatgagcctaagattacgtatgttaactggtctaaaaaaggatgggaaaatcaagtaccagatattgatgtagtcattaatttagcaggagctacattaaataaacgttggacatcctcttacaaacaaacgattatgacaagtcgtattcaatcgactgaatctttagttcatttatttgagcaacggcaacataaacctgaagtgctttttaatgcaagtgctatgggttattatcctccaagtttacatcgaacttatacagaacaatatcaaacacttccttttgatttcctgtcagatgtcgtttatcaatgggaacgatttgctcgtcgtttcgaaaattttggtacacgtgttatattgggaagatttagtatgattttgtcttctgaaggtggcgcacttcaaacgatgaaactaccatataaattctacgtaggcggcaaattaggttctggccgtcaatggtattcttggattcacatagatgacttagtgcgtgcgattttatttacaattgacgaatcaaatgcaaaaggtccatttaatatggcttctccaattcctgaacgtcaaaatttatttggttatacacttggacgtacgatgcataaaccacatgaaacgtgggtgccatcattaattatgcgtgctgtactaggagaaatgtcgacagtagttctcgatactcaaaaagtcttacctaataaattagaagcattagggtttaattttagatataataatttaaaagttgcacttgaagacttaattaacgaatagtatttggagatttagtaatgaatgacaacaagttaacgtatatcttactacttatcgctagtgtatttttaattttaaatggtatctttgctttcgaaaagagtattattatggtacttttatctttcttctttattattataggattattattagggtttgtagctatacattatttattaaaaactaaaaaaccataaaaaaaggaagagcatcaatgctcttccttttttacatgttaaacaattctatttacatatcttcaagttgcattacatgatcaattaaaccatattcttttgcttcatcagcagttaagaagttatcacgatcagtatctttttgaattgtttcaatattttgacctgtacgttcagctaaaatacgatttaatttttcacgtgtttttaagatatggttagcagcaatttcaatttctgtcgcttgaccttgagcgccacctaatggttgatgaatcataacttcagcgtttggtaaggcaaaacgtttaccttttgtaccagctgctaataagaatgatcccattgacgcagccataccaatacaaattgtttgtacatctggtttaatgtgttgaattgtatcgtaaatagcaaatcctgctgttacactaccacctggagaattgatgtataaataaatatctttttcagaatcttgagcttgtaagaataataattgtgatacaattgaatttgcaacattatcatcaattgctgagcctaacataataatgcggtcttttaatagacgagaataaatatcatatgcgcgttcaccacgatttgttgtttcaataactgtaggaattaaattcattatatttcctccttgtaattaactgttatatttattttacaataaaagtcaaaaatggtcaaaaataatacctttacatttatttgacgttgcgttttataattttatacactattcatatattcaaattgtactgttaattatatatttagtacagaaattagtttttatattatactcctcgtagtgtaatggatagcacgtaagattccggttcttaagatagaggttcgattcctctcgagggggctattattaaaaataggatgaaacgttatattaatgtttcatcctattttttaaaacacattttattttataattcgactttttctccatttctaattttatcagcgagttcatttaattttcgtaagcgatgatttactcctgatttagaaataggcccatttgatatcatttctcctaattctttcaaagaaatttcttgatgttctactcgtaattttgcaatctctcttaaacgatcaggcaaattatctaaacctatttcttcatcaattaattgaatgctttgtacttgtttcatagctgcactcacagttttatttaaattagctgtttcacaatttactagtctattgacagagtttctcatatctctcactattcttacatcttcaaattttaatagtgcttggtacccccctatcaaacttaaaaactcagaaattttctccgcttctttcaaataagagatacttcctttttttcgttctaaatgcttagcatttaatccataactgttcattagtttagttaatccctcagcatgcccttcatattgagaaaaaatttctaaatggtaggaagaggtttctgggttgtttactgatccacccgctaaaaatgctccccttaaatagcttctacgcatttcatcatctttaatcatactcgcatcaatatcatgaacaaaaataccattttttaaaatacctaattcatcaagtatttctttaacacgtactttagttcgacaaatatagatattattcttttttaatttcattttttttcgtactaaaatttctacttccacattaaaaatacgcttaattaatgaatatattcttcgagccgtagtcgcattttcagtttgaacattaattacaaattgttgattagataaactgagtgcaccgttcatccgaatcaaagcgctaagttcagctttagcattactttcatcgacttcaatacgggtcaattcacttttcatatctgatgcaaaactcattgatgctccctccttttctcatcatcattattatatgtaattaacatctcaaaatatataacactctatatcaaattatttttaaattcattaaaatttattttttaggtttaaattgaattgtacttgttaattcaagtgctaaatcatatataaggttagcaagcacctttgtattatgacgaacgaggacgtggtcataaacttctacaagatttttagaagtaatcattttaatatgattttctgttaattttattttattcatattaacaggatgagcattacgttctttatatcgttgaagaatctgttcatcaaatgcatcattactacaaataacataatcaataaatggttctccagcatgttgatgaatagctttaatatgatcgtagacatcataatcatttgtttctcctggttgagtcataatattagatatgtataatttcggtgcttgtgaacttattattgctttagaaataccttcaatacacaaatttgaaattacactcgtatacagtgaaccaggacctagaacaattaaatctgcttcttgtaaagcatcaacagcttcctgcatgggttctacattagatggttctaaatagacacgtcgaatttttttattttttttaggtattttagattcaccttcaacaatctcaccatcttctaatacagcatttaacataacattagtattagtagatggaatcacttttcctttaatgtttaaaattttacttaattctttcactgcatgaccaaagtcattttttatatttgtgagtgctgcaagtaataaattacctaatgagtgaccttcaatttgatgttcttcaaaacgatactgaaataattcttctagaataggttccgcatcacttagcgctgcaatgacatttctaatatctcctggagcaggaatagacatttcatccctaattttacctgtactaccaccatcatctgcgactgtaacaatagcagtgatatctattggatattctcgtaatcctctagctagtactgagagtcccgtacctcctccgattagtactactttcaactgtttcatttcttcacgccactttcaatatgtgcatctctatgatgaacatacacattataatcaaatatatcatttaactcttctccgatacgcttagctaaggctacagagcgatgttgtccgccggtacaccctattgctataaccagttgcgatttaccctcttttttataacctggaatcataaaaataagtaaatccattagtttttcaaagaaagtttcagtttctttccatttcatcacataattataaactgcttcatcttctccagtcatcggtctcaagtcttcaacataatatggattaggtaaaaaacgtacatcgaatactaaatcagcatctttctgaataccatgtttaaatccaaaactagttacattaatactaaatgaattcattttttcattggcgaaacgacgtttgattctttcttttaattctttaggctttaactctgtagtatcaataatgtaattcgctattgacctaatatttgaaagcaattgttgttcttctagaattgaatcaattaaagacatttgaccattttgatttaaagggtgcgctctacgtgattctttatatctagaaattaatttttcagttgtagcttctaaaaacataatatctacaataacatcatttcgcgttttaattgcatcaatttcatctacaagtgatttaaataactcttttcctcttaaatcaattgcaattgctactttttgaagtgaaggattaccttgctccattaactccacaagtttaggtagtaatataggcggtaaattatctacacagaaaaagccaatatcttctaaacattgaataactaatgatttaccagcgccagacaatcccgtaataactaatagttcacttttgctcatttcatcatttatttgattaaccattctaagcaccatccatttaatcatacatatatttatataacatcatagcatatatttttacattgctaacaatttgtatcgactttactgctaagaaaaaagctagtaataatacttctatcagaagtgattattctagctttaattaatatcttaagcttcttctttatcatttaattcttcgatataatcaattgcactttgtgcagcaatactaccatcacctgtagcagttacgatttgacgtaatcctttatctctcacgtctccagctgcaaaaatccctggtacagaagtagtcatatcatcttttgtaataatatagcccatatcatttgtaatacctaaattattaaatggtgctgttagaggtttcataccaatataaataaagacaccgtctgcatctaacgtttgctcagacgcatcttttgttgaaactaacgttacagatcctacttttccatctttttcattaattgatttcaaagtgtgactccaaataaaatcaattttttcatttttaaatgcacgatcttgtagaattttttgggctcttagttcgtctcttcgatgaacaattgttactttatcagcgaatttagtaaggaatgcaccctcttctaccgctgagtcgccgccaccaataacaaatatatttttgtttttaaagaatgcgccatcacatactgcacaataacttacaccacgaccacctaattcttgttcaccagggacaccaatttttttatattctgcacctgttgaaataatcactgctctagctgttattgttttatttcctagattaatcactttgtgatcgccattatcttcaattgatttgatatctccatattgataagaagcaccaaattttttcgcatgttcaaacatttttgttgataaatctggacctgtaatcatttcaaagcctggaaaattttcaacttcttccgtatttgccatttgtcctccaggcataccgcgttcaatcatcactgtatttagatttgcacgtgatgcataaactgcagcagtcattccagctggtccagccccaattatcgcaacatcaaaatctacttcgttcatttttatacctcctacgtttatattaatacgcgcattatatagtattatttgcttttcataaatttatatgctcaataatttatcaattgcgttatctaatttatatcttgtagtattaaaaatttcaataattttctttttagttatatgctttttatgataacggtaatataaataaacatgtgccgcaatatatctatttaactctttaaaattaacgccttcaacgattaaagcttctcctttatcaatccaactgacaaataattctgtatcaaacgatagttcttcaacgtcatatattttctttaagcctttatgaataaaatcaagcttatttaaatgtaatccttgaactaagtaagttaaatataacttttcatagtcattcatgttttccaatactgaccaaatgtcttcagtcattagtatttcttttccatttaactgatttaataaaaatacgccatataatcgataatgactgtcatcatctaataataaaggtaatattttttgttcaaatgtgtatttactttcttctaatacccatggggcataccccacatttacttcagaaatttgcaataatttatcccaaaatagtttactttgttctttatttcctaagtaataatagttataacttaaagcattaaacatttgaactgaaacaaacttaccctttttatataaaggtaataaaagttgttgagacgctttgtactgtttaagataacttagtacaatacctaacttaaaactttcatcttcattcatcggcatcactttatttaatatttttatatatttgtgatacttctctgtttcattagtattatataatagcaatgtataatgacatagtgcatgaacatccgagttatcttcagcaagcaatgtttcgaataattctttagcaatctcatattcactcaaataaagataacacattgctagtaaatttctaataacgcgatgcgactgaatatcatcgttttgttttaaaatatacgttcgtgcttcttgtaaccgtccttgagcgaataaatattgaaataataattgaactgcaaataattgtgcttccatttcaattttattttcttcaatataagaaacttcgaacatgttttctaattcttctctaaaagaatcatcatttgataaaactacataattaataccaaacaagaaggccttgtttggctcattaagtttaatattcagctgactcaattgataataactttctgatacattatgatcatttataatgctttcataaaacattttttctgcttttttattcaaattcaattcatttaaacaatcggcatacttaagttttatatcaaaatcttcaggtgacaaatctagcacatttccataatattcagctgcttttctataatttctctgtttatatttttgatctgccatctttcgataaaaattctcatcaaaagtcattggaataattttttgttcctttcgtgccatgctttgtcaccactttcttatttattatgaatttgcatggggtttccaaaagcaatagtatcattgggaacatctttagagacgatagtacctgctttaatcataacgttatgaccgattttcactccaggtaaaatggtcacatttgctccaattaaagtatgagaaccaatgtccactcgtccataacgatactcatttactaaaatttcatgcgttaatattgttgtattataaccaataacagtattactgccaatagatattaactggggatgaaaaatatcaggcattaccttataggcaaatgcagttcgttccccaattgacatcttcaagaaatgaatataaacatatcgtttcacatttaaaaaaggaataaatcgacttatttctattattactgtattttttaacactttagaaaaacgaacaaattggtaaatgcgccataagggattcatcgactgtgtattaataatagttaatcgtctcattattttactttccctcttgaattccaagttaatggtccagcatttttataaatagctggttgatattttattcgacgatagataatcaaagtcataccaataataattaaaataattgaaacaagttgagctatgcgaatatgacttgttaacattaaactgtctgttcgtaatccttcaacgaagaagcgccctattgaataccaaatgagatataatgaaaatgtttctccaacgcgtaaatactttctaagagtaattaatataataaaaccaagtatatcccaaatagattcatataaaaaagtaggatgatagtatacaccttcaatatacatatttcgaataataaattctggaatatgcatattttctagaaatgttcttgatactggtccgccatgagcttcatgattcataaaattgccccatcgccctataccttgagctaatataatgcttggtgcaacaatatctccaagttgaaaaggattaagatttttcaatttacatagaataattccagtaataaagccacctattaatccaccgtgaatagctatcccgccatgccaaattttaggtatttctgatggattttccatataataaggccattgaaatataacaaaataaattcttgcaactagaaatccgaaaattgcacaataaaaaataatatctactaatgtatctttatgtaatcctatagatttcaagctttcttgagcaataaaatatccaatcaatattcctactgcaataataattccataccattttatcgataaaggacctatatcgatagcagtaggattgatataattcaaattaaaaaacatatactatatcccttcattctgattcccattcttgagaatttcttcatttaaacgttgattaaattcttcagctgtattaatacccatgatatttaaacgataattcattgcagctacttctataataacagcaacgtttcttcctggtcttacagggattgtttttttagttatttccgtatctaaaatctttaacgtttcttcatttaagccaacgcgatcatataatttattcttatcccaattttcaagatttatatttaaccgtatttgtttttgggttagaattgaccccgctccaaataaagtcatgacattgataattcctagtccacgtatttctaataaatgttcaattaacttaggtggtgtaccaatcaattcgtctttcgtaatttcgcgaatttcaacattatcatctgctactaaacgatgacctcgttttactaattctaatgctgtttcactttttccgatgccagagtctcctgtaatcaatacgcctacaccatatacgtctactaaaacgccgtgtagagaggtcgttttagctaactcatgttctaaaaatgtcgttaatcgactcattaaacttgtcgtagcatctttagaaacaatcaaaggtgtctccatttcttgagccgcttcaatcagttcctgagggggctctaatcctcttgtcacaataattgctggggtttcaggacgacataattttctcattcgtcctcgtctttcttcatctggtaataaattgtaaaatgataattcagtggtacctaataattgaatacgatttgctgcataatgagaaaaataacctgccatttctaaaccaggtctagaaatatcaatatttttaattgttttatttaatcctttttctccagtaaatagcttcagttttaatactttaaccaatctctctgtcgttaacatgagttcacctcaaaattcccttgaattaattcatctcttatcatatcaaaaatataacaatatgttatataaaaaaggagtagaaaattatttttctactccttttttcaaaaccattaaaatgatattctacttcatttatactctaaaaaagcactatcgcacattaaattctattttattcatctcgcactttatcacgttctaacactgtttttaagtactcacctgtataagaagcttccacacttgcaatgtcttctggcgttccagttgcaacgatagtaccgccaccttctccgccttctggtcctaaatctataatataatctgctgttttaataacatctaaattatgttcaataataaccactgtatctccattttccacaaggcgatttaatacttttaataatcgactgatatcgtcaacatgaagacctgtagtaggttcatctaagatataaattgatcgtcctgtagaacgtttgtgtaattctgaagccagtttcacacgttgtgcttccccaccagaaagtgtggttgcttgttgccctagagtaatatagcctaatcctacatctacaagtgtttgtaattttctatgaattttaggaatattttcaaagaaataagtcgcttcttctactgtcattgctaatacatctgcaatattttttcctttatatgtgacttctaaagtttctctattgtatcgtttgccatcacacacttcgcatggcacatatacatctggtaagaagtgcatttctattttaataatgccatcgcctttacaagcttcacaacgaccacctttaacattaaaactaaagcgtcctttttgatatcctctaattttagcttcattcgtttgagcaaaaacatctctaatgtcatcaaatacacctgtatatgtcgccgggttagaacgtggtgttcttcctataggtgactgatcaatatctataatcttatctaattgatcaatacctttgatctcatcatgctctccaggtttaactttagaattattaattgtttgagctaatgatttatataacacttcattaactaatgaacttttaccagatccagaaacacctgttacaaccgtcattactgacaatggaatatctacatcaacatcttttaaattattactttttgcacctttaattgagattttacgattcgtaacttctctgcgatgttccgggacgtcaatacgttttttaccgctcaaatattgaccagttaaggatttcttgtctttcattacctttttaggagtcccacttgagacaatttcaccgccatgattacctgcaccaggtccgacatcaacaaggtaatcggctgctctcatcgtatcgtcatcatgttcaactacaattagtgtgttacctaaatctctcatctcttttaatgtattgattaaacgatcattatcgcgttgatgtaatccgatagaaggttcgtccaatacataaagcacgcctgtcaatcgtgatccaatttgagtagcaagacgaatacgttgtgcttctccacctgataatgttcctgaagaacgattcagtgttaaataatcaagccctacattatttaagaatgttaatcttgaaataatctcaattaaaatttgtttagcaatcgctttgtcttgctctgataactctatattctcataaaatttgagtgcatttttaattgaatattctacaacttcgccaatattgtatccaccaacatatactgaaagtgcttctttacttaaacgtttaccgtgacatgtttcacatggaagttcagtcatatatctactcatcatttcacgtgtatattctgatggtgattcgtgataacgtcgatctatattagggactacgccttcaaatttcatttttctacgacgtgtgcctccatttcgactatgaaatgaaaactcaatttctttatcgcctgacccattcataagaatatctttttgtctatcagtcaattttttatatggcttatccatattaattttataaacttcacatactcgttttaataatgttggataaaagtcggaacttgtaggctcccaaggttcaatcgcaccttcatttaaagttttattagtatcaggaacaaccaaatctagatctactgtaagtctttgacctaatccatcacatgttggacaagcaccgaatgggctattaaaactaaacattctaggttctaattcacctatagaaaatccacaaattggacaagcatgattttcagagaatttgagctcttctccaccaatgacatcaacagtaaggtttccttcacctagctctaaacttgtttctattgaatctgctaatcttgtttctattcctgattttacaactaaacgatctacaactacttcaatagtatgatttttatttttatctagtgcaggaacctcgtttacatcgaccacttcaccatcgacacgtaatctgacatatccctttttgccaatatcttcaattaatttttcatggctcccttttctatgtgaaactaaaggagctaaaatttgaattttagttctttcttctaattctaatatacgatctaccatttgctgcacggtttgcgattcaatttcgattccatgatatggacaaaatgctttccccacacgtgcatataataatcgaatgtaatcatatatttcagtcacagtagctactgtagaacgcgggtttttacttgtcgttttttggtcaattgaaattgcaggtgatagtccctcaatggtatcaacatctggcttatccatttgtcctaaaaattgtcgtgcgtaggcacttaacgattctacatagcgacgttgtccttcagcatatattgtgtcaaatgcaagtgatgattttcccgacccagagagaccagtcatcactataagtttgttctttggtaactcaatatcgatatcttttaagttatgtgctcttgcacctttaactacgatacttggacctttcatgtaataatcacccttctgcttttagttcaaataacatatctctcaattctgttgctctttcaaagtctaaatctttagctgcttttttcatttctttttcaatattttcaattgttttctgacgttctttctttgtcattttcttaggtacttcagtttgttgcttttcatttgtttcatcattatccactgtagcactaatgacatcatgtatttttttattgattgttttaggagtaataccatatttttcgttatgtgtcatttgtatttctcgacgacgctgtgtttcatcaattgcgtactgcatagagtctgttatcttatcggcatacatgataacttctcctttatcgttacgtgcagcacgtccgatagtttgaataagtgaacgatttgaacgtaaaaatccttctttatctgcatctaaaataactactaacgacacttcaggtatatcaataccctctctaagcaaattgatacctactacagcatcatatgtgcccattcttaaatcacgtataatttctatacgttcaagtgttttgatttcagaatgaagataattcactttaattcctgcctctttcatatatgttgtcaaatcttcactcatttttttagttaaggttgtgacaagtacacgttcattcctatcaattctttcttgaatttcactgagtaaatcatcaatttgattcttcgtaggtcgaacatcaattttaggatctaataaaccagttggtcgaataatttgttctaccattttatcagtatgttcaatttcatatggaccaggtgttgctgaaacataaacgagctgtttagttttttgttcaaattcttcaaatttaagcggacggttatccatagcacttggtaaacggaaaccatgatctacgagtacttttttacgtgcttggtctccattaaacatacctctaatttgtggtaacgtcacgtgcgactcatctatcattacaagccaatcatcaccaaaataatcaagtaaagtataaggtgtggaaccaagtggtcttaatgttaaatgaacagaataattctctattccagaacaaaagcccatctctctcatcatttctaagtcataatttgtacgttgttctagacgttgtgcttctaataatttattttcagctttcaattcttttaatagctcttcaagttctttttcaatacgttcaatagcgactttcattttttcttctctagtaacaaagtgggaagcagggaatatggcaaaatgttctctttcacgtatcacttcaccagttagataatttacttctctgattctatcaacttcatcgccaaagaattccactcggatacacatttcttctcttgaagcaggaaagatttctacaacatctcctcttactctaaatgtaccacgttgaaaatcgatgtcgttccttgaatactgaacatcgactaattttcgaagaagctcacttctatccatttccattcctactcgaacgctaacaactaagtctttgtattcttctggattacctaaaccataaatacaacttacacttgcaataataatcacatcatcacgttcgaataaagcacttgtagctgaatgtcgtaactgatcaatttcatcgttaattgaggcgtctttttcgataaatgtatccgttgatggtacatatgcttcaggttgataataatcgtagtaactcacgaaatattctaccctattttcaggaaagaactctttaaattcactatacaattgacctgctaacgttttattatgcgctataattaatgtaggttttccaacttctttaataacattactcatggtaaatgttttaccagtacccgttgcaccaagtaatgtttgatgacgtttaccagctttaacaccttcaacgattttttttatggcttgaggctggtccccttgtggttcaaattcagaatttaatttaaaaggatgatgttctaccattctttcaagcgcctcctcagtttatttttattaattgtttatttcagtaaaaataatactatttatacttattttaacaaaaaagtaaataaaaaaacaaacgtttgttcgcttacgtttgccatcattttttatacatatataaaagatgagacacaaatataaattcatttctatatttatgcctcatcttaatatgttgacgtatttttattagatatgtattaataatataaaacaaatggtatagtactgcaatttttttggcttaatcttgatgtttgtgaaattctaaattatcaataatcacataaccagctaggatagatactacatctaaaaatataatccattcattatgaaaaaatcctttatacactgaagcggcaattaatatcaatgttacaataacgcctacccatttacttctggtaatgacactaaataaaataactaagatacaaggaaagaaagcagctaaagtataccataccattatattcactcatttcttcttcgtcgttctaagattgtcattgttgtttcacgtagttcagcacgaggaataaagttttccgtaagcatttccggtataacgtgatcaataaaatcttgtactgaacttaaatgatcaaattgcattattgtttctaggctatgttcataaatttcaaaaaacagatcttccggattacgtttttgaatttcaccaaacgtttcatataataagtcaattttatcagctactgataaaatttggccttctaaagaatcatcttttccctcttgaagtcttttacgataaatatcttggtatggcttcggaatttcttcattaatgaacgtatctaccatttcttcttcgacttgagaaaataacatttttaattctctgcttgcatatttaactggtgtcttaatatcccctgtaaatacttctgcaaaatcatggttaagggctttttcatacaagcttttccaatcaattgaattaccatgatattcttcaactgttgctaagtattgagctattttagtaactttaaatgaatgtgctgcaacattatgctcaaaatatttgaattttcctggtaatcttattaatttttcaagatcagataaacgtttaaagtattgatgaacccccataatgcggttatacctccttatattattaaatagaaattatacttgtatttattatatcaatcaatcgtttagtaaaaagttttaattgtgataatttcataacttttatttctttttttaaacaatacattgcattattaataactaaaaaaacatcaacaaaacataagctttgttgatgctttaacattataaatcctttgaaaatttaatgtataaaattataactagacgaattataaattgttctatttgtaacatcattgaaatgaccattccaattcatctctgaaacataaaacgaaccatcattgttcacacgttctacgatgcccacgtgaccataataacccgctggtgtttggaaaacagcacctacttctggacgatgatcgaccactaaaccagcatttctagctgagcttgcccaattatttgcatttccccaatagctccctactgaacgtcctaattgttgtctacgatcaaatgcataatatgtacagttaccaaaataataatgattaccttggttatttaaagcgctattattataatatactggtgcacttactgtttcagtattgtaattattactagtaacatatgatggagacgctacatatgacgcagtttcagcgctattatagcttaatggtgcagtttcagtttcacttgaataaggcgtagcatatacactactatcacttatcaattgactttctaatgttgctgaacctttgtcacttactgcgattaaatcaccaggatgaattaacggttttactcctggattaaatgcatataattcatctaatgttaaatgatgagcattcgcaatgttgtttaatgtatcaccagatttaacttcaacaatatctttatcaggtacaactattgaaatatctttttcaacttcctcattacctatatgatttaatttttttatctcatctgcagttgtagaaaattgttgtgccaatgcttctacatttgttttttctttaacaatgtgtgtttgttgtgcatgtgctaacgtatttaaacctgtaattgctgcaattgaagcaaatgttacagtcattgatttttttaacatgttgtcattcctttgctgtagtgtatgcttgttcattaatactttagcataaacaacattaaaaaagaggaatgttaaaaccttgtaatataaaggttaaataacactcctaaattagtttaaattgattaaattagtaatattacaagtcacgaattacattttaaagttagatttatttagattttaaaattttattttttattaataaacaactcaatcaatcattttgtgacatcgtttgtcgtaaataagcttctataaatggcgcaatatctccatccattactgcatctaccttagcagtctcttcatttgtacgatgatcttttaccatagaatatggatggaatacatacgaacgaatttgactaccccatcctatttctttttgttcaccacgaatttctgccatttcacgttcttgctcttctaacttcaattgatataatttagatttcaacattttcattgcagcttcacggttcttgatttgagaacgttcattttggttattcactacaattccggttggatggtgagtaatacggattgcagactctgttttattgatatgttgtccacctgcacctgatgctctaaatgtatctactgtaatatcatcaggattaatttctatttctatctcatcattatcaaattctggtataacatcacaagaagcaaatgacgtatgacgtcttccagatgaatcaaaaggtgaaattcttacaagtcggtgtactcctttttctgcttttaagtaaccgtaggcgttatgacctttaatcaataatgtaacgctttttactcccgcttcatcacctggtaaataatcgatggtttctattttaaagccttgttgttcaccatatctttggtacattcttaataacatgctagcccagtcttgagattcggtccctccagcaccaggatgcaactctaaaatagcattatttgcatcatgtggaccatctaataataattgtaattcaaactgatcgatttgttctctgaatgatacaatatcttgttctaaatcttctttgatttcatcatcatattcctcttgaagtaattcccatgttgcatccatatcttctaatttatgattgagctcatagtaaccattaactatcgattttaatgcattatttttatcaataacatcttgagctttattttggttatcccaaaagtctggttctgtcatcatttcttcatattcttgaatatttgtttctttattttctaagtcaaagagaccccctaatttgttctaaatcattattatattcatcaatattacgtttgatttctgataattccactatatatgtctcctttatttataaattctttaaataaaatacgagatcgcgacaaaagcttttaaatgataagcaatatacgtctcgatctcgcctaattataattacttgatattaatcttctttaccatggcaatttttatattttttaccactaccacaaggacaaggatcattacgtccgattttttcaccttttacaataggttgtttttttgctttttctttgccatcttcagcagatacgtgttgtgccttgccaaaatctgttgttttttcacgttcaacttgttcgtctacttgaataacagattttaatatatatttagacgtatcttcttcaatagcttgcatcattaagtcaaataactcgtgtccttcattttggtaatcacgaagtggattttgttgtgcatatgaacgtaagtgtataccttggcgtaactgatccattgtatcaatatggtcagtccaatgagtatcaatagaacgtaataaaatcatacgttcaaattcaggcatttgatctccaattttttctttttggctttcataacctttttcaattttagtccataccacttcaaaaatgtcttcagaatctttacctttaatttcttcttcagttaattctccttcttgaataaacacatcattaacataatttataaatggtccataatcaggattatcgtcttcatcgttaatatagtagttaatcgctctctgtaaagtagtacgcatcatcgcaataacaatttctgaactatcttctgaatctataatgctattacgttcattataaataatttcacgttgtttacgtaatatttcatcatactcgagaatacgtttacgtgcatcaaagttatttccttcaacacgtttttgagctgattcaactgcgcgtgaaaccattttagattctattggcgttgaatcatccatacctaaacgattcatcattttttgaagtctttcagaaccaaaacgaaccattaattcatcttgtaatgataagtagaaacgactatcccctttatctccttgacgacctgaacgaccacgtaattgatcatcaatacgacgagattcatgtctttcagtgcctattactgcaaggccacctatttcttctacgccttcacctaatttaatgtctgttccacgtccagccatattagtagcaatagtaactgcacctttttgtcctgcattggctacaatttcagcttctctttcatgattcttcgcatttaatacatcatgacgtataccgcgttttttcaataaatttgaaatgtattcacttgtttctactgcaacagtacctaataaaactggttgtccttgtttatgtttttcaaccacatcgtctacaactgcatcaaactttcctttttgactaatataaattaaatcagacttatcttgacgttgaacaggtttgttcgttggaatttgagttactgtcatattatagatattacggaactcttcctcttcagttttagcagtcccagtcattccagctaatttattatacatacggaagtagttttggaaagtaattgaagccattgttttagattcattttgaattttcacgccttctttagcttcaatagcttgatgcaatccttcagaaaaacgacgtccaggcattgtacgaccagtgaattgatctacaattaatacttctccatctacgaccatgtaatcgacatcgcgttgtaaagtcacatgtgctcttaaagcagtattaatatgactaataatatctacattttgaacatcatataaattatcaattttaaacattcgttctgctttatctgcaccttgttctgttaaatgaacagcttttgttttttcatcatatttataatcttcatccgcttttaacatcttagcaaaaacattcgcttgagtataaagagacgttgacttttcagcttcacctgaaataattagcggtgttcttgcctcatctattaaaatagagtcaacctcatcaataatagcaaaatgtaatggtctcattacgcgttcttccgcataattcaccatattatctcttaagtaatcaaagcctaattcattatttgtactataagtaatgtcttttgcgtatgcttcacgtttttcttcagtagatttgctatttagatttaaaccaactgttaaacctaaaaactcatataattcagccatttcttcactttgaacactagataagtattcattgactgtaataacatgaacgcctcgtcctgctaaagcatttaaatacgttggcattgtcgcagttaatgttttaccttcaccagttctcatttctgcaatatcgcctttatgaatagcaataccacccataacttggactttataaggtgacatgttaaatacacgttttgcaccttcacgtactaatgcaaatgcttgtggtaaaattttatctaaatagtcattttgtttttttacatcttcaattgcttgtgcttcttcttgaaattgctttgttttatttctgatttcttcgtcagttaaaatcgccattttttcctctaaagcaagtacttcatcagcttttttacttaaacgtttcacttctttcttattgccgtcaacaatttttgataaaaatcccattatgttcgctcctttagctaaaaaaactgtttggcctacaacaatttataatatcatttataagttcaaatttatacttaaatactcatataaacgatatgcttaattgtgtacaataattacttttatatttaaactttctttctatttcaaaaaacttactatcctttaatttttaattacctcattacattagcatagcatgattataccgtccatgaataagtgtaaaatagctagttgatagtagcttcatactcattcttcacattgtacgatacatataatatttattattctcttctaaataataaaagtacctgggacatcaacttgtctcaggtacctttaaacaagggagtagtcattgactgaattgaatacgtgcctatgtcatgcattttcaattctagtcatagctcctctcatacttaaactttcgtaaagaacgtctacattcaactattcagttgtttcaatcagaccatatttaccatctttacgtcgatacacaatacttgtaccatctgtttcacgatctgtaaaaatgtaaaaatcatgccctaataaatccatttgtaatactgcttcttcagaatccattggttttaagctaaactgtttagaacgaataatttctatttcattctcatttgatgattcagaagtcgcttccacatcctcattcactactgtttgttgctcagcaataaatggttctggttctccattatctctattcttacgattcacacgcgttttatatttacgaacttgacgttctaatttgcttgtaactaaatcaatgcctgcgtataaatcgtcgtgtcgttcttcagctctcaatgtaacattttttaaaggaattgttacctcgattttagtagctgaattttgatacgttttaacttttacatgtgcaactgcatttggcacattattaaaataacgttcaagtttaccaattttttcctcaatatagttgcggatagcatctgtaatagtgaggttatctccatgaatttcaaatctaatcatagttatctctcctttaacctctaatattggtattcttactattataatatcatgtttaagtcatcttaaaaacgcaaacactttgaattttctgacttttttattacataatacactccccgcataatgaactgtcaaaccggtagtatagatatcatcaatcagtaaaatatttttattcgtaatatctatattttctttaagatagaacggattgtcagctttaaatcgctctctttttccaagtcttgattgcttaggtcgtgaacgtgtccctaataattctatatagcttacccccattttgtccaaaacagtggttactggattaaacgttcgatgttcatctcttttataaggggatgggatagggacaatatagtcatatgacgttttaggcaatgttaactttgaagctaaaacctcagctaaatagtaatccttcataaatttgtaatgatgaatcgtttctttcattattccatcatatttatattcacaatacagttgtgacattagagtaaattgttgattgagacatttacagtctaaacattcatcacttgcttttattttataattaagacatcttgtacatctttttttatcattgatatcaagtttaatggcttgccattgttttgtgcatgtttcacaaaattgttgtggtgatttataaaaattaaatatagatagttcttcgtgaataggagtagcacactgaatacatttattcatcaatccaccctctttgaatcactaatttattcatttttgtaatatcttttttagccatcaacattgatatactcacaccttcatgaagaaataatacctttcctgtgggagcttcttgtttacgtccaactcttccagcaatttgtactaatgtagccttttcaaatgtatctgcattaattacgataacgtctaattgagccatagtaaatccacgttctaaaattgttgttgtaaaaacaattcgatgttttccttcacgaagtgctttcactttttcaaaacgtaaagcatcttcacttgaaatacatatcaaatctgaaaatatttttttatagtattcggatatcttaatcatattttctatattattaaaaaatactaacgtaaatcttttatgttcaatctgatttaataacatgtactttaaaaaactttgagtacgattcatatttaatttaaaatatttaaattttggaactggtaatgggtgtctatgaaagcgagcaggtaactgtataatgcgatgttttggtatttgatgcagtaaatgtctaggtggcgttgcagtcatataaatcaatgtagatagcggtttagccgcttgtttaatagcattttgtagatgatgatccataggaagcggaaatgcatcaacttcatcgacaaaaataacttcaaagtgatttttaaatcgatatagttgatggatagtacaaattacaaaatgtccgttatattgttgtttacttgattgatgcaatacgtcaatattttctttcaaaaaaacttctttaatacgctggctaatctctattactacatctactcttggagagatgactgctacattaaatcctcttttacgtgataagctaataccctcatatatcatctctgtttttcctgcaccagttaccgcatataatagtaagttttcacagttttctatagcagataagattttttctgatgcataacattgctgttcagataatttaaaagataatgtatataatccctctgatttaacatttttacttttaatgattttatattcagtaatattatccattcttcctagatgtatacattgtcgacaatatattacttctttattaagaatagaggaaaaatattgatagaaatgagcactatcttcattaccacattgaatacatcgatatccttttgaactctttacgatacctaacgttttctcactgattatttcatcttttaattctatttctgaagatactaatcttccataatatttaatatttcatcacttccttattaaaataaaaaaagtctaatcgaaaaggagatgggtaccttagccctccatgttctcacttttaacgattagaccttcatcttatttgattacaatttttcttgggaaatatccaactccgattccacctgaacctaaatgagatgcaatgactggtccatattcacaatattgaatattaatgtttgaatatttctcttttaatttagcacaaaaatctttaccctcttttgttttatctccattaatcacaaacactgttacatcattaatatttttcgcaatatcaagtgcatgttgttctatagaattataagctcgcttacgtgtacgtactttttctaaaggatgaatttttccatcttcttcaaacttaagcactggcttcatttgtaaaagtgttccaatccatgcttgggcaccagtaatacgaccacttttttgtaaattttttaaatcatcaacaaataagtatgcacctgtatctttacgaatagacgttaattcctcaataatttcgttaggggttgctccgtcttcaatcaattttaatgtataaatcacatagctgccttcaaccatagaagctaatcttgtatcaaatgtgtggacttgaatgccatctaccatttcacctgcttgtgttgctgattgataactcccactaataccacttgataaattaaagacgataacatctgtataacctttatctctcaattcctcgtagttctttatccattcaccaatagctggttgacttgttgtaggaattgttttagatgcggccatttttttataaaaagattcttttgaaagatctggatgttcagtaaatgtttctccatcatcaaatgttacactcagtggtgcaactggtatctgatatttttcaataatatgttttggcagattcgcagtagagtctgtcattactgcaattttcataatcgtcctcctcaattatactcaccagtattataaattattttaataaaaaaggaaattcataatcaattatttatctaaaagaaaacaaacgtgtataataaaattcatattaatcatatcgtggaggtatttatcaattgagtgatcgtgttattactataaaaaaagaacatattattgaaaatacaattaataaatctcgatttattgctcatatcaaacctgtttcctcagaagatgaggctaagatgtttatagaagaagtaaaacaaactcataaagaagcaacacataattgttctgcatacactgttggcaatcaaatgaatatacaaaaagccaacgatgatggagaaccaacaggaacagcaggtattcctatgcttgaaatattaaaaaaactggatattcacaatgcttgtgtggtagttactcggtattttggtggcattaaacttggcggtggcggattaattcgtgcatatagtggtgcagtacgagatgtgatttacgatatcggccgtgtagaattaagaaatgctattcccactactgttaccattaattatgacttaacaggtaaatttgagtatgaacttgcttcaacttctttttttctaagagacaaagtttacactgataaagtgagttataagattgatgttgtagaaacagaatacgattcatttatcgaatttttaaaccgtaatacagcaagtcaatatgatttagaaaaagatacacctaagcaattaccttttgatattgaaacaaattaattaaattacaaaagccagcaaacgcttaagattgctggcttttgtaaataagtgaataaaaatattatttatggtttgtcttatggcgagatgcatcgtcattttttttagaaattaaattaagaataagacgataactatcatctattaaaccagtaaattcaacgatgagttcaattgtgatgacgattaagataaacattagtaatacacctaatggttgagataaatacaatataatactcgataaactaaacataatcgcaatagagtatatcagtaatactgtttgacgatgtgtatatcctaatgcaagaagtttatgatgtaaatgtgatttatctgcttgcataatgtgttgaccatttctcactcttctaatcattgcaaataaggtatcaataaatggtaccgctaaaataacaattgggaagaataaagaaataaatgtgatatttttaaaacctagtaaggataaaaagccaataataaatccaatcattaatgctccactatcgcctaaaaagattgtagcaggatggaaattaaagaataagaagccaagtaacgcgccaatcagcaaactacaaatcataatgataaatacatttccttgtaatatagctatgaaaccaatggtagttaaaccaataactgacacacctgatgccaaaccatctaaaccatctattaaatttattgcatttgttattgctacaatccatataattgtaatcggtatacttaaaataccaaaatgaatggttggaccaattggaaaagaaataaaatctatggtaatcccgtaaaaaacaacaactgatgccgctataatttgtccaattaactttaaaattggcttcaaatcataaatatcatcaatgatgcctacaaaatacataataattaaaccaattaccaaaggtttaactgccctctctatgggatggcctaaccataaaccaataagaaatgaaagtagtatgacagtacctcccatgactgatactggttttgtatgtacttttctatagttaggtcgatctactaaattaaatttaaaagaaacctttattataataggcgttattattaaactgattaccaatgttacaacaataagtaataaagtatacatcagttcaccttcaatatattcctgttattttttcatctatactatttaaacaattattatcaattttttaaattagactatagtagtatatatactttttcaattttatatattattagtctgtttattttcttcgtaataatctattcattaaacagaccacttttaatcatgtatcataaactaattaaaattaattgtaaattttttgtaaagatacgtattttttatatcatatcattttgttataaatttgaacatgaaagtctatctgaaattcataatatatattttataacaaacaacttaatgacaaatagtaagttttcacttacaattactaatggttaatttaaaggagtcgatcccaatatgtttgaagcaactatttacaatattgccgttatggtagctggaatttatttattccatcgattacaatattcagaaaataaaatcatgatattttctaaaggttatgtcacaattttaatgactttggtggcattactaataacagcttaccctattccttttcatcatcaatatcttattcgtctaacttttgttccgttactattccttggtcgctatacaaacgtcggttacacttttattgcctcacttatcataagtctagtggatatatttttattcggaaattcatttttttatagcgtcgttcttattataataggtattattgttagtttaattgggccgtttcttaaaaaaaatgatattattgctttaattattttaaatgctatcagtattgttattatttttgttttatctatcttcacaactttatatgatttaactgaattaattatacttatacctatttcattcgtactaacgattacttctgctgttacctttgttgatatctggcatttcttttcgcttgttacacggtacgaaaatgaggataagtatgattatttaacaggtttaggtaatgtaaaagaatttgatagacatttaaataagatttctcaaaaagccgaaatagaacatactagtctcgcacttttactcgttgacattgacggatttaaagatgttaatgatacatatactcataaagcaggagacgctgtactaaaacaaatgtctcaattgcttaaaaattatgtaccacatcaatttaaaatcttccgtaatggcggtgaagaattttctattgtcatcttcgattattctttagatcaaagtgtgaaacttgctgaaaatattaggatggcagtcgaaaaatcttcgttccatttacctaataaggaagttataaaactatctgtatctattggcgttggttatttatctccagatgaatataaatctcaacgtaaagtatttaaagacgccgatgatatggtccatgtagctaaaaaagaaggtcgtaatcaagtaatgtttaatcctataattaaattatagacgttacgatttaatttgagatggaacgtggaattcgaaatgaattctgttgcatctcttttttatactcttttaacatctatattatttatttgttattctacttttaaaatgactgatttagtaataaagtattaatacaagcgaagaatattatagatatacacgaaaaacattatatattttaattattgtgggggtgcttttatgaataattcaatcactattatcgatgaaaataaggtgattgatgttgtattaatagctggtcgcattctcttagaatctggagctgaaacttaccgtgttgaagatactatgaatcgaattgctcacagttatggtttaaatgatacatatagctttgtcacatcgaccgctattattttctcacttaatgatcgaacaaatacaaggcttataagaattagagatcgtactacagatttagaaaaaattgctcttacaaatagtctttctagaaagattgctaaaaatgagctaaccattgatgaagctaaatcagaactgattcatctaagtaaagcttcattacaatattcttttttattgaatttttttgctgcggcaattgcatgtggctttttcttactcatgtttggcggtgttgtttctgattgctggattgctattttagctggcggcgctgcgttcttaacttttagctttgtccagcgtttcattcaaattaaattcttttctgaatttgtagcatcagcagtagtcattacaattgctgttacatttactaaactaggcattgctacaaatcaaaatattataacaatttctagtgttatgcccttagtgcctggaattttaatttgtaacgctattagagatttaatggctggcgagctacttgctggaatgtctcgtggtgtagaagctgcactaacatcattcgctattggtgcaggcgtagcgattgttttattaattctttaagaaaggctgtttatgtatgttattttatctatttcattttgttatcagttttatttcgacggtacttttttctattatatttaatgctcctaaacgacttttgcttgcttgtggatttgtcggcgccttagcttggacaatttatcaatataccgtagatatggatttaggaaaagttggcgctgcttttttaggtagtttaattcttggtttattaagtcatgtgatgagtcgacgctataaaagacccgtgattatcttcattgtgccaggtataatccctcttgttcctggtggtacagcatatgaagcaacacgatttttagtatctaatgactatactcatgctgtgaatacatttctagaggtcacattaatttctggttcaattgcttttgggatattggtagcagaaattctctactatatttacacacgtattaagcaattttatggtaaaatcaaaggaaaaacgtatagaaaatcttacaatatgaacaatagagtctaaggggatgtttcgttatgaaagtacagattatagatagattatcaagatatgtaaaaatagatacacaatcaaatcccgaatcgaaatcgacgccttctactgaaaaacaatgggatttattacatttattacaaaaagaactgcaagactttggattagaaacagaattggataataatggttatctgtttgccactttagaaagtaacatagaaaaagaagttcctacggtcggtttcttagcacatgtagatacctcaccagattttaatgcgacaaatgttaatcctcagattatagaagattataatggtcaacctattaaattaggtcaaacaaatcgagtattaagtcaagatgtatttccagaacttaaaaaattagaaggtcacactctaatgattacagatggtacatctttactcggtgccgatgataaagcaggtgttgtagaaattatggaagcagtaaaatacttgcagactcatccagaaattaaacatggtcgcatacgtatagcttttacacctgatgaagaaataggtcgtggtcctcacaagtttaatgtggaacgctttaatgccgattttgcctatactatggatggcagtgaatttggagaattacaattcgaaagttttaatgcagcagaagcaacaatcactgcccatggtgtaaatgttcatcctggttctgcaaaaaacgtaatggttaatgctattggattagtacatcaattccatagtctactacctgctaatgaagtaccagaacgtacagaaggttatgaaggattctatcatttaatgaaaatagaaggaacagttgaaaaagcttctttacaatatattataagagatcacgatagaaaatcttttgaacttaaaaagaaaaaacttttagaaattcgtgatgatattaatattcattatgaaggttatccagtaaaagtagatatcgaagaccaatactataatatggctgaacaaattaagccacatccgtatattattgatattcctaaaaaagtatttgcagatttagagataaaaccaaatactgcgcctatacgtggtggtactgatggttctcagctttcatttaaaggtttacctacacctaatatttttacaggatgtggaaacttccatggtccatttgaatatgcttctatcgatgtaatggaaaaagcagtacaagtgattattggtattgctcaagaagtaacacaatatgaaaaataataaataaaaaaagtttagttcattctttgaactaaacttttttatttattttattcccttagctgtagtttttaataatcgtaaagcttgaactgtataatgtctaatttgaagacccattttaaaatctgtgtatgttttcggcatttcaataaatgtattaaacatggctgttacgcgatgatgattaaatatatcaaacttatcattagtcgcacaaattgcaatagatggtttgtgatatttttctgtaagttccgcaatagtcaatgtggttgtttcaagcatatgatcttcttcttttaaaccctctccaaagataattaaatctgcctgagatactaactcatctaaatgtgtaatttgatttactagttcatgactcgttaaaatttctgtgttgtataatgctttcaacaccgcagctataccgccaccggctccgccacgttcaataggtcctaaagcaatatgtaattcatttttcataatctcatttaagtaccaaattaaattatcaatttctactgcttttttgtgtggaatttgatggttatagcttaatttcataatttcactattttttccatacaacttactagaaaaatccgtcatcacttgtagtctgacattttccaatgtactaggcagtccagaaatgtcaatatgacgaatgaacttaatcatttgtgcgccttctcgtgcgtcaagttctctattttcatcatcataaaatttagctcctaaagcttgtagcatccctacgccaccatcaaaactatccataccacctaaagatataataatatgatctgtgtccttgtttaatgcatctaaaataacttctcctaacccaaaactagtacgttgttcaattgctttatgaccttttgaaaataaattactttcaataattacagtaccttcttcagtttgtccatatatcgtttcaatctcattcatatcggcatcatgaacattcactttatattttgtacctgagtgccaaagaaatactgaatttaataattcatgacgtccgttaaataaaggtacctgtacaatatctgcatgatcaatttgacttgctattgcctcttccacataacgattcgcttgataactcgaaataataccgttaaattcatccatggctactaaaattttcattctattttcacctcatgccactttctatctttcttaaattcatacgttataacttcactttcacattatacataggttcatcgcatatttcattttttacattttataaatataaaagtcatttaaagtgataaaaatgtagatataataaagagctggtaacaaaaaatgtaccagactcttaaatcgatatatttatctttcttactcttcagcttgtgctaatgtagatacattaatatcactgtgacttgcattccatacagcttttccatctacaaaataaaaagcttgtggtgattcatgtttcacatttgtcttttcagcaatataatcagaaagttttctttcttcttgaactactagataatatccatctatgtctctttcatataaaaacttattaaattgatcaaatgctgcagctgaaattggacatgtgtcactatgttttaatacaaatacatcgttatgttcttctaatacttgttcaaactggtcaatcgaactcagctttatagccattctattcacctctaaattttttaactttgtccctttttttaaattaaacttctcaatggctacaattatacacatttcatcatataatgttaaccaaaaatttaaatttaggttttattcgttttgctatactttttctaattttgttttaaagttgtgatttcccttacttaaatctttacccgttttaggtagtttctcaacattaatttttgaaagttgatcttcaatcttaatagttgtttcacgtgtctcataataattaagtaaattatagtacatttctatcgcatttttacgagcattgtttacatgtgaatctgtaatattagtctgatttaaatctttaatctgtttttgtatcagtggttttatatgctcattaattgcttttgaagtaggataattatccttttctaaatatttttgagcagtttttcgtaaattacgattattgttttcaattttagattttaatagatgtgcattttcttgattatttgttttacgtatatctttttctactagtgctctatttatttcaaatgaatgtgtataatttagaattttttcattttccacaactgattgattatataaatctacaaatgatttaatttcatttatagattgatgttgcttactcacatgatttaaataatctttctttaattgacgagttttatttgtcttagccggaagatgtttagcttctttttcatactctttaaactcaggcactaaacggtgatttatatttttctgtagtcgttcaaatgactttttatttttatctgttgtatcggttttacttatatcatttaaacggttcagctctaattgattcatcactttttccacgcttttttgcttggtctctactttagataggtgttgtttgaagcgatttaaatcttcgttattattctcaccacaaccagaaagtatcaaacagtatagtgaatataatgaaagtattattaattttttcatttttgcactcctaacacccgtattatacataaagttatttatattgaaaataaattatgttatagtatttcagaatttgtataattatttaattgaaggagttacatatgtatgcatctgttcaatcatttataaattgtaccaacgtcaatgattatcatcagttgtatgaagacactaaagctctgttatttaacttgttagattctccagtaaaattcacacaacatatcgggggaacaaaacatttttcttatcccacagaaccgattttagatgttttagttggagtcaataatctccatgatattacctctcttgatgaaaagagattgaattatgtaggcttttatcgattacaccatccttataaaaagaaagtgatgatggcaaaatttgataatatgatcaatcttaagcaaataatacgattacacattattcaaatagatacgcccttattcactcaatatttagctatagatcacgtactgtctacacaaaaacacgtagcacagatgttttctaatcagaaaaatgaatttatcaatttaaattcaacaatccgatactacgaaaaccaaaaacagaaattttttgataatttgtatcatacactttaatgatatacaaattgttttaaactcttttagcaaaacatatgtaaagttgctataataaagtttagattatagaagagaagaaaggatgtacttatgttagaacaagaagacatcttaaaagatttaaaatctttagtacctgacaatattattaaagttaatgaaccgttaaaacgttatacatacacgaaaactggtggaaatgcagatttttacctttcacctatcgaaaatgaacaagtacaaactatcgtacgttatgctcaagaacatcaattgcctgttacatatttagggaatggttcaaatattattattcgcgaaggcggtatcagaggtattgtgattagtctattatcccttaatcatattaatgtctcagatgatgcaattatagcaggaagcggtgcagcaattatagatgtatcgagagcggcaagagatcacgttcttaccggcttagaatttgcttgtggcattcctggttctgttggtggtgctgtttatatgaatgcaggcgcctatggaggagaaattaaagattgcatcgattatgctttatgtgtaaatgaacacggcgatttgatacaactgactaaagaacaattacatttagactatagaaacagtgtcgttcaaaaacaacatttagtagttcttgaagcagcatttactttagaaccaggtaacttgaacgagattcaagctaaaatggatgattttacagaacgtcgtgaatctaaacaaccacttgaatacccgtcatgcggtagtgtattccaacgtcctccaggtcattttgctggaaaattaattcaagattcaaatcttcaaggtcatcgtattggtggcgtagaagtctcaactaaacatgctggatttatggtaaatgtcgataatggtacagcaacagattacgagaatttaattcatcacgtacaaaaagtcgtgaaagaaaaatttgatgttgaattacatcgtgaagttcgaatcattggcgaatatccaaagtcagagtaaattctcaatgtaaggagatgtgaaacaatgccaaaagtttatggttctctcgtagacaatgaaacacgttgtattcactatcatacattgcttgacattatagcgattaaatttaaatgttgtgaaaagtattatccttgttaccaatgtcataacgaacatgaatctcataacattcagcgttggtcagcagaagaatttcataaaaaggcgatactttgtggagtttgtcaaaatgaactctctattcatgaatacatgatgactgaaacttgtccaagttgccaagcacattttaattcacgttgtaaatttcactatcatttatattttgaaatttaatacttaatttaaatgatatatagaataacatataaaacaaagtattttgacgagactcttgaaggaacggctacagactaaagttgtcccctaacaaagcgagccaaccatacgaagtattgtaaataaagaagccagtaaatgaatttataataaactcatttactggctatttttctaggatgtatgtcccactcttttattcattctaaacttagtatcctagatttattttttagttttatcaattactttttctaactcatcaatttgttttactgttgttgttgttgaacctgaagcaaagtaccataatttagggtctaattcataaacattgttatttttaactgcttttacatctttaataacatcattttttaacacttgtttagctgtcgattttccacccacaactgatccacgatccattgctaaaatgatatctggattatgattactgatatattcattattaatattttgaccatgtggacttattttaacgtgtttatccgctggtttaaagcctagcgtattaaatactaaatcaccaaatcttccacctggaccgaatgtagaaagttctccttcattaactaaaagatacattacagatttatctaaatccttagtttgttttttcatatctgaaattttttgatctaattttgtattcatatcttttgctttatcttctttgttgtaaattttacctagattttctgtattctttttcatatctttaatataatgatcttcacttgcacctacatagacaactttagctttaggcgctgcctttttaaactcatctagatttttctgagtggctgctctacttgaaatataaataacatccggtttagcttcagctattttattgaaatttatttcttttaaattaccagtattaatatatttatcctttttaaattcacttagaaaacttggtaaagattcattattttcaccttttggtaagcctttcactttatcagctacacccatttcttttaaaacatctagtgctccataatctagaataaccgcgttcttaggatttttaggcactttcacagtgttactaatttttttaccctcattactactttcgtcatttccacttgctgaaaagctatttttaattgaaactgtatcttttgaatcattttcattatttgatttattactagaattattactacacgctgataatactaaagctaaagttaagactaaaaataagactgttttcttcatatgtatttctccttttataagttaactttggcactcaatttttcaagtatttacttttatattttctaagcatcacccctttaaatataaaaatatttatctcattttaaaagataacctcatcatagtataaacaaatacgttggcctctaatttcttctacatgaacatccatttcatataaatcacttaacacatttgtttcaatcacactatcttttgggccagatttaataatttcacctttctttagtgcaacaatgtaatctgaataacaagatgcaaaattaatatcgtggagtacaataacaatcgttttatttaaattgcgacacaatgttcgaagtgtctgcataatttgaactgaatgtttcatatctaaattatttaacggttcatctaacaaaatgtattctgtatcttgagcaattgtcatagcaatatacgcacgttgtctttgtcctccagatagtgtttttatatttctatctttgatttcccttagatgtagtaaatcaatggcatatgccactttctcatgatcttcttttttcattcgaccttttgaataaggaaaacgtccaaaatttacaagctgttctacagtgatattcatatcagtatgatttgtttgttttaaaatacttaacttttttgctaattcatcgcttttataatcatcaattaatttattttcaatattaattgtaccgttctcatattcaaataaccgacttactgctgatagaagtgtactttttcctgcaccgtttggacctatcaaagaggttaacttacccttttgtatatcaacatttatatctttcaaaatagatttactctgaatttttttatctaaatttctaatctgaatcaatcttcattcctccttttaataagtaagtatatgaagtaaatacctccaactaaatctataataagactaaattcagtggtagctttaaacatattttctataatccactgagctataaataaactaatccaacttataagaatcgttgcgggtaaaatatatttatgttcatatgttttcatgaattcatgcgctaaattgactgttaataatcctaaaaatgtaacaggacctactaaagcagtagatattgatactaataaagccactaaaattaataaaagttttgtcattttttcatatgatacacctaagttaatagactgatctttccctagtaataacacatctaaataaggtcttaatataaaagcaattacaattaaaataattaaaagtatacttgaaataagaacaagtttagaattagaagcgtcaaaacttgcaaacatcgcactttgaacggttaaaaagtcatctggattcataataagttgaataaatccagtgatactacggaaaaatgttcctaatactaccccaacaagtaaaataaaataaaccgaaaaatgtcctaatttaaacatgccttgaaataatactaaagaaaaaagaaccatcactacgagagttagaagaaaattcaaataagtatttgtcactacactggcttgtgtacctaataagaacacaggcaagactttaataaataaatagactgagtctaatcccataattgaaggagtaagtaatctattcgcagtgatagattggaaaataacaactgccgtactaatagatccaccaacaagtaaaattaaaactaattttcttattcgactttcaaactgatattgaaaaatttcaaaatccaaacctactagtaagtagaaagcagccatgcaaattgtaaaaagaaagagaattaatatttttttattagcactaatttgcataattatttctacctttcatcaataaaactaagaaaataatcgttccaaatactcctattgttaaaccaatatttatttcataagggtaaacaattaatctaccaataatatcggaaaacaatacaaatatagaacctagcattaatgtatgaggtaatgcatttttcaagtggtcgcctctatacattgaaataatattaggaacaattaaacctaaaaatggtaatgttccaactgtcacgacaactaatgctgtcaatgttgcagtgattaaaagcgcaatatttataatttgttcatatttaacacctaaattatgactaaaatctttgcccattccagcaatcgtaaagtgattggcaaatatataagcgataattaataaaggaatagctaaatataaaatttcataacggccgcttgtaataacagcaaaattcccattcaaccaattattaatactttgtagtgcattcgttcttaatgctataaaagtggtaaaacttgaaacaatgccaccaatcataatacctaagagcgggacaaaaataacttctttcacttttataaaattgattagtttaacgaataaaaatgttcctcctaggcttaatgcaactgcaaaagtcaatttgatcaatatatgaccttttgggaaaaatatgagtgaaagtaatattcctaattttgcccattccattgttccagctgtagtaggacttacaaatttattttgcatcatctgttgcataactagtcctgctaaagcaagagaacttccagataaaagaatacttatagttctaggaatacgactagaaaataaaatatttttctgattatctgacaaatgaaaaagatcagttattgataattgacttacgccaataaataaagaaagtatacttaatatcactaaaatgattaataatgtataacctttgaatagaaacttcattcgtaatgctccttagtatatataccatttccattgaaaatgattatcatttaactatatattaaattgtcataataaatttttcaatagtaatactaatattcttttattttttatagagaaattaaaaaaactaattgcagtgatgattctacaattagtttttctaaaattagttattattctaatcttcaaaaataaaatcttcgtcttgtaaagcttccacgttaagtgctaatgtatagccgtctccttttactgagaaaaagtcatgattttttgttgatgtatctaatgcgttttcaataataggattaaactctttttcttcaaaataaggttcaaatcctaagtttgataaagctttattcccattatattgtacataatttaaaacatcttcagttaaaccgatatcatcatataacatatgtgtatacgatacctcatttttatatagttcttctaacaacttatacatttctttatcagctttttgtttttcattttctgatagctcattacgtaaactttgagcatctaaaccggtaaaaactccatgaattgattcatcaagtaaaatttttctaataatttcaccagaagttgtcatttttccttgacccgcaagataaagtggataatagaaaccagaatagaacaagaacgtttctaagaaaacacttgaaactcttgccatatattgatcaaaaatagaggcttcttttccccaaagtttatgataattagagataattttatcagatttatattttaaatgaggctcttcaattacccaagtatctaatagataatttgtttcactagatggaagtaacgttgtaaaaatatgtgaataacttttagcatgaatttgttccatcatttgcataaatgaataaactgcttttttacgtaaatccgttgtatgtagcataattaatggcataccatcatccgcttgatgtgtatctaatccagttaaacctgctaaagcacgtttaaacgtatttttttcatcctctgttagtgtcttccaacttgctatatcctttgaaactttaaattctgtttctacccacatttgtgaaatgttttgacgccaaaacatatttgtcatatcttcttgagtattccaattgacggccttcattaataaaatcctcctctatttattaaccattacattatttaagaggataagattaaaatgcttctctatgagaataatttaatctttcctctaaatatttatttcactattaattaaattgcacaacttgtacattcttcaacacttaataatttattacgtgtatagtataaagatttcaatcctttgtgatgtgcgtatacgtataatcgtgacaattcacgtgttgaaatttcagaattaacatataaaattgttgaaatcccttggtccacatgtgtttgaattgttgaaattaaatctataagtttcatttgatcagtattaaatgctgatttatagtaccacattgtttcaggtgataagaaaggcattggataaaatgtttcagcatttccatacgtacgtcgctcaatttgatctacgattggcatgaccgaactagttgcattctgaacatatgaaatactttgagttggtgcaatagctaatcgataagcatgatataaaccatattcttgtacttgttgttgtaatgatttccagtcttctgatgtaggaatttgcatattagcaaataattcttttactttttcaaattgtggcacgaactcttgtgatgtataaaaatcaaaatatttgccacttgcataatctgatttatcaaaatcttgatatgcttctccacgttctttagcaatttccatagaacgttcaattgaataatagttcatcatcataaagaaaatattagcaaaatctttggcttcttcagattcatagccaattttatttttcgctaaatagccatgtaagttcattacgcctaaacctacagaatgtaactcattatttgcttttttcacacctggtgcattttgaatatttgcttcgtcacttactactgttaatgcatccattccagtatgtactgaatctctgaatttacccgtttccattacattcactatgttcaatgaacctaaattacatgaaatatcacgtttaatttcatcttcaattccatagtcattaataatagacgtttcctgtaattggaaaatttcagtacataaattactcattttaatttgaccaatatttgaattcgcatgtactttattcgcattatctttaaacattaaatatggatagcctgattgcagttgtgtttgagcaatcatattcaacatttctcgtgcatcttttttctttttaagaacattaggattagctacaagttcatcataatatttttcaatatcaatatcgtctaatgtcactccatattcttgttttacagtatgaggtgcaaacatataaaagtctttaccttctttagctaaatcaaagaatttagatggaacaataagaccagtggaaattgttgatagacgtaagtcttcatcggcatttacttttttagtatctaagaattcttcaacatcataatggaaaatgtttaaatatactgctccagctccaggacgttgacctaattgatcagcataactaaatccaccctctaatgcttttgctacaggtaatacacctttagctacgcctttaatacctttaattgcttcaccacgtgcacgtaatttagataaattgatagccacgccaccaccaattttacttaattgtttagcagtagaatctatgaaattaattgagtttagactatcatcaacttctagtaaaaaacatgaaacaagctctccacgacgtgcgcgtcctgcatttaaaaatgtaggtgtagcaggttgataacgttgttcaatcatcgctaaaataaattgtttagcttgttctttattaccatctgctaaatatagagcaactatagcaacatgttgattatagtcttctaagtacttagatttatcatttgtttttaaagcataatctttataaaatttgcttgcagacatataactagcaaattcaaaattaatagattttgcgaattcgataatttctattaaatcttcttcgctatacttcttaaatacattaaaataaaaatgattatctactaagtaatgtaaacgttcaatttcgctatcaaaataaattgttttatcgctaatttcttctaagtaaacgtttaaagcttcttgatctttctcaagattaaaaaagccattgtctttacgtttagttacttcattgtttaattcaatatgattgtactttttctcgtccataatcttcattgaaatgccccaccttatctctaaattcgataacatctttatttgtaccttgaacctcaaatttcattaataaaggcacatggtatgtttcagaaattgttcgacctgctttcgcaaagttttgtccccagttacgattaccactagcagcaacagcacgtatataggcatgattaacttctagaaaagactgtacttccttaggaacttcaccaaaaccaattgtacctgtaactaaaatataaggttcttctatactatccttacaattgtctttattgatttctaatacatttttaatttcactacgttttataaatcttcgtacatttcctgaaaaagagaaataaactactttcataggaacgccctctttcgacaatcttattaattaaaaagaagttctcttagtcttataagaaaacttacttttagaacgaatatcatttcgttaacttaatcaagctaatactacatattgtgtttctaattattaatctttaaaaatcattatttgtaaatcgttcatgtaaatagtgtagattccgaaaaaatcaacccaaataagtgtgaaattgctactaaaatgaattattcatacaatctttctattttcctcaaacacaacatattgtgtctcaattcaaaacccaacactatattctgtgtttcattatacataaatgatatcctaattaaaagttaatatttgatgtcaaatgttcgtgaaatcggttaaaggtgcatcatagctatattaaaaactaagaaaattttattttagtttttttaaggtatttcacttgattttttgcctaccattactaaaccttatttattcgggatttccaatacataagaatgtaaatcgtaatatattgttaaccatttattaaaaaaataactcattttttatattaaaagccgaataaatttctattttacgaattaaaaatttagagtatatctaaccatattaagaacatatgttcgttatcattataatttttcttttttatctttgcaagtacttatgcatccacaaataaattatgctaatatatagacgttaaatttttataaatgaggagatatactttgaatcctaaggtaaaaggtatcattgctattttaatttctgctattggttttagttttatgtctgttttttttagactagccggagacttacccgtatttcaaaaatctttagcaagaaatttggtagccatgtttattccattatttttcataataaaatataggcaacctatattgggtaaaatgagtagtcaaccccttttaatgactagatcgacgttaggtcttataggggtattattaaatatttacgctattgatcacatggtgttaagtgatgctgatactttaatgaaacttaaccctttttggactattttattaagtttaatatttttaaaagagaatattaaaaggtatcaaattatagctatgttaattgctatttttggtatgttattcattgttaaaccagaattttcttcaactatgttctcttctttagccggtttattctcaggtatcttcgctgcatctgcatatacttgtgtacgagcattaagtaaacgtgaagcaccttatactattgtattttatttttcattattttcagtcatcgttctgattccattttctattgcaacatatgaaccgatgacaaagttacaaattatatatttattaggagctggattatcagcggcagtaggacaaattggtattacattagcatatagttttgctccagcaaaagacatttctatttttacgtatgcttctatattatttactgcattatttggctttatattattcgaagaaacaccagatttctatgcatttataggttatatcatcattattggcgctagttactttatgtttgaaaaagcacgtagacaatctaatacatctaacaattaggaggcaaattatgacacaaggtcgcaataaagaagaattacaagatattacattattaggcaatcaaaataataaatatgaatttgactatacaccccaagtactcgaaacttttgataataaacatcaaggaagagattattttgtaaaatttaattgtccagaattcacttctctttgccctatcactggacaacccgattttgctacaatttatatttcatatataccaaatataaaaatggtagaatcaaaatcactaaaattatatttatttagttttagaaatcatggtgattttcacgaagattgtatgaatattatcatgaatgacttaattgacttaatggatcctcattatatagaagtatggggtaagttcacgccacgtggaggcatttcaatagatccatatacaaattatggtcgtccaaactctaaatatgaaaagatggccgaacatcgtttaatgaatcacgatatgtatcctgaaaaaatagacaatcgataaaatgtttttaactccttttatttttactaatgtaatataaaaggagtcatttttattctagatttttttaataaactattgcgatttattaaattaaagcgtattttaatattatcgttgaaatttataaagatataggtcttttatttttataagttattatattttatttgactgaaaattctaaaaatttatatttttaagaaattcttgtaaaacttaattgtacaatcttatttacatagtaatcagtcatattaggaaagaaaggagtgggatgttaatggcaacaaataactcccatgaacaaacaattcaatcaataccacagaaaggatttttcggtcatcctaggggattaggtgtgctctttttcgtagagttttgggaaagattcagttactacggtatgcgtgcgatgctcatattttatatgtatttcgcaatacaccagaatggattaggtattgataaaactacagcaatgtcaattatgtcagtatatggagcactgatttacatgtcttctattcctggcgcatggattgctgatagaattacaggcacacgtggtgctactttattaggtgctgtacttattattattggacatatctgtttaagtttaccattcgccttatttggtttattctcatcaatgttctttattattatcggatcaggtttaatgaaacctaatatttcaaatattgtaggtcgtttatatcctgaaaatgatacacgtattgatgcaggtttcgttattttctatatgtctgttaacttaggtgcattaatttcacctatcatactgcaacattttgtagatatacgtaatttccatggtggcttccttcttgcagctattggtatggcattaggtcttgtttggtatttattatttaatagaaaaaatttaggtagtgttggaatgaaacctacgaatccactatctaaagaagaaaagcgtaaatatggaatgattatcggtatcatagtagcaattgtgattgtcgtattattagttacatattatacccatacactttccttcgatttaattagtaatactgtattagttctaggagtagctttaccaatcatttactttacaactatgcttcgtagtaaagacgttaccgatggagaacgttctcgagtaaaagcatttatacctttatttattttaggtatgttattctggtcaattcaagaacaaggttctaacgttttaaatatttatggtttggaacgttctgacatgcaactcaacttatttggttggacaactcgatttggagaagctttgttccaatctatcaatccattatttattttattatttgcaccagttatttctatgatttggttaaaaatgggtaaaaagcaaccttctttagctattaaatttagtattggtacattactagcaggtttatcatacattctaattggattagttggtttaggttatggacatacacaattctcagttaactgagttattttatcatatgtaatctgtgttattggggaactttgtttatcacctacaggtaatagtgctgctgttaaacttgcacctaaagcatttaatgctcaaatgatgagtgtatggctattaacaaatgcttcagcacaagcaattaacggtacattagtaaaattaattaaaccacttggtcaaactaattattttattttcttaggcacagttgctattgttattactcttatcattttagttttctcacctaagattacgaaagctatgaaaggtattcactaattaaatacaaaatagtaaaaaatacttctagttataacatatagaagtattttttacttatatatttaaaattataaaattcagggtaattatttataatataattttaaatgaaagtaggttgaactatggagcaacagtataatcatggggtgttattttaccatgaacatagcggacttaaagatatctatgatggattgggagaagtcgctaaatcactaactcagttatgtaagcatctttcaatacaattaagtgaaaatgaaggtaacattgaaagatattgtaaagaaataaaagaccatacttatagtaatgatatcgatatcgtttttatattgggaggagacggtacagttaacgaattgattaatggtgtaatgaaatatgatctaaaccttcctataggtatcattccaggtggaacatttaacgattttactaaaacattaaacttaaatcctgacttcaaaaaagctagtgaacaattgttgtcttcacatgttgagtcatatgatgttatgaaagtaaatgataattatgtacttaactttgtcgggctaggacttatggtgcaaaatgctgaaaatgttcaagaaggacgcaaagatatctttggaaaattaagctatgttggttccactgtaaaaacactcatgaatcccgaccattttgactatacaatgacagtagacgacaaagaatataaaggaaatacgtctatgctagttatagcaaatggacctaatattggtggcagtcgcattccacttacagatctttctccacaagatggaaaattaaatagttttatatttgaacaacaaagttttagtattttaaacgatattttcaaaaaaagagatagcatgaattggaatgaaattaccgaaggaattaatcatattccaggttctcacataacattacgcactgaaccaactatgaaagtagatattgatggagaaattaatttagaaacacctatcactattgatgtgttacctaaagcaatcaatatccttactttttcgaatgatgagaaataacaactatatcataatcaaaaggtatgtatgattgcttcaagcttcatacatacctttttactttaattgttatttaaaaacattgcttctacatctttccagccattcactcgtttaaaacgtgtttcatttatattatgtgcagccgtaaagataataggttctccttcgaaaatttgaagctgacgaggattatcatctattaaataatctgttttaacaatattttttcttccacaaaaaataaaatgctgtggatctaaaaatggaaaatattctaataaccattcatatttatcatgaaatgaagtgggtacgtccattgccgctgtagcgatatatacatcataatgctcattaagtttttctactacctcttgagcatgtggtatcactttaagatgtctaaaaaactctggcgctcttaaaatatctcttactaacccatcatgttcaggaatcacatggtttaatttgtgaccatttaatgattccattgtaattcctaatttagtttcaatattaactgcttcaataattgcacctaaagtatctgctaatacttcatccatatctattgctatagatttacgtgccatgctatcacttccttagttatcttttgcacattttcaaagtatagcaaaaaacctttaattcgtcatgaatcgtaattaaaggtttttcattagtttaataattaaattgttttaatacttcaatcattttattattttgttcttcaaatccaattgtaatacgtactccattaggaaatggtctagtgatacagccaacgtttagtaattcattatacaatgcttgtggcttatctgttactacaaatacaaagttcgtttgactaggtaaaaagtgtttactttgttcaatgtcataaaacttttcacgttcttttgcattttttttagtaatctcttttaaataatcttgatcctctaatgctgcaatcgctgcatattctgaaattcgtgtcacattaaatggtggacgaatgatattccatttttcaatagcttcatttgttgccacaacatatcctacacgtaaacctgctaatccatatgctttagaaaatgttcttaataaaaatgcattatcaaagcgttcttgtagttttaatgtatcaggataatcttcagcagtgacgaattcgaaatacgcttcatcaattaagactggcacatgacttggaacacgttccaaaaatgactctaattcatcatgactaaaatatgtacctgtaggattattaggattacataaccatactaatgaggtatcagaattaacctcttttaaaatgccttccaaatcaaatccgccattttttaacggtacttttacaacttcagctgattcaacaatcgcattatgataatattgtccaaaagtagcttcacttgtcacaattttatctcctggtgttaaaactgctctagaaatcataagtattacttcatctaaacctgcgccaaataaaattcgagattcatcaacatttaaatgcttactaattgcttttcgtaatgatggagagcctgtttccggatagtagaataactcatctaagtgcgcttcaattgcttcttttacacgaggtgatggtccatataaattttcattcgatgctagtttatataactcaccttctataccaaatttttctttaagtgcttgcggtgataacccaggttgatatgccgataattgttgtagttgttttttcatttatgatcactcctatataaattaagttactttcctttttcacttattaattaaaatagtaccataaattatcgatttatactttatgtgttaaaaagctcatagataaaatgtatctatgagctttttacaaatttaatgtgccaatccttctttttctaaatattgtttagcaactttatatggatcttcatttttcactgtcactttataattcatttcttgcatttgttcatccgtaattttatttgataattgatttaaagcttttttaatttccggatgttcttttagaaacttttctttaaacattggagcaccttgataaggtgggaaaacatgtttatcatctttaagtactaccatatcatattgttttaattcagcatctgtagaatacgcatcaataagattaatgtcgcctttctctactgccgtataacgtagtttaggttccatttgtttaatattagaaagattcaagttatattttttagctactgctttataaccatcatctctatctttaaattccatagtaaatcctggtttaagttgaccttgtactttacgtaaatcaccaattgattgtaaattatattgtttagcaaaatctcttttaacagctaaagcataggtattattatatttcattggtttaagcatcgtcatatcatattttttctctaaacttgctttagcttggtgatatacatcagcttcttttttagattttagatcctctttagtaagttctcctagtactgtacctgtaaattctaagtacccatctatatcgtctgattttaacgcattaaataagaatgaggttttacccataccacttttaacgttaactgtatcatgtgtttcctcttcaattaatattttatacatattcgtaataattgaaggttcagaacctaattttcctgccatagtaatcgttgcactttttttaccaaagagtggaacaacaataacaagtaagataattaatagaataatacctagtgtaataagaagttttttataagataatttcgccatataacgcaatataaaatcaaataaaatagctaataatgcagctggaatagcgccaatcaatataagtgctgtattgttacgatcaatgcctaataagatcaaatcccctaatccacctgctccaattaatgcagctaatgtagcagtaccaataataagcaccatagctgtacgtatacctgccataatgactggcattgcaataggtaactcgactttagttaaacgtcgcattggtttcataccgatacctttggctgcttctgttagagaaggctctacttctttaatacctgtatatgtatttcttaaaataggtaatagcgcatatactactaatgcaataattgctggaacttttcctataccaaaaattggaatcattaatccaagtaaagcaagggatggaatagtttgtaataccgctgcgatattcattacaacttcagataaacgctttgttttagttaaagcaataccaagtggtactgcaattaaaattgcgataaataaagcaataaaagaaatttgtatgtgctcaaaaattgttcttagtaattctcctctacgatcattgagcgttgttaaaaattcgttcatgttttaaccctccttatcatttttagatagatagtcaaaaacatcttctcttcttaataatgactgtgttaaagcatgattattttctacaatgactgcttcatgtttagcaagtatctcgtaaatatcttgaagtttcatactatcttttataattgggtatccttgtttttcgtcatattcagtaagtgttcttgtaagatttagatcggagatttttgaattattgatatctttatgcaagtgatcgcccataaactctcgaacaaattgatttctaggatgctcttggaatccttcaggtgtgtcaatttgttcaacacgaccatcatttaataaacaaatacgatctcctaatttcattgcttcttgtatatcgtgtgttacaaaaataattgtctttttaattttcgtttgtaattctaataaatcatcttgtaatttttctctactaatggggtctaacgcactaaaaggttcgtccattaatattactggaggatcagctgctaatgctcttaccacgcctacacgttgacgttgtcctcccgataattcatctggtttacgatctcggtatgtatttggatctaatctaaccatatctaataattcatctacacgtcgatgaatatctttgtctttccactttttcatttgaggaacttgtgcgatattttctttaatcgtcatatgtggaaataatgcgatttgttgtagtacatatccaatatcccaacgcatctcataaactggataatcactcactggcttctctttaaaataaatgtatccttcacttaacggtattaatcgattaatcatttttaaagtagttgtttttccacaacctgaaggtccgattaaaataaaaaattctccttcattaatcttaaaactcacatcatcaactgcaacattcgttccataacgttttgttacatttttaaactctatcatcttgtcaccttcatttccttcacatcactataaaatttatattgcttattttctattaaatcatgtttattgataaattcatacttaatagatttaaatactaattattttttaacaataaaaaataaaacaacttaaaacatttttctagcttctaagttgttttattaagtcatatttaattttttgttagatattcgttttatatgattggattgtttcaagaaatttaggacaataatgttttaacttatagcttcctacaccatctatcgcaatcatttcttgtttagattctggtttacgtttagcaaactcttctaatgtatagtcagaaaaaatactcacaggcgcaatattcaacttttcacttaattgacggcgaacttctactaattcactatataaaacacgatcaacgccttctattgtattaatgaaaactttttccttacttttatgtttaaatggcgtcgtatacactgtgacatcattattcaataattctttcacactttcatcacacgttagaatttcattatattcatttaaaaagcctttaaaccgtaactcatcaattaaatgacttaactctgaagtagtatagtctttcatcaatccatgtgttgtaagttgatgataatgattgtatttaatataatcactcaattctccacgtaacacttgaataataacatgatagttttcttgttgacgcatgcgtgcgatacaactaataatcatttttgcttcattggtcatgtcataagatttattttgttgaatgcaattactacattgaccgcattcctctagacgcgcattcggttcaaaataatgtacaattgtcgcttctaagcactttttcgttttagtatactgaatcattttagttagtttctcgcccattttatctttataatcatcatctgcttgcgaaacagtaataaaatattcatgtactcctttatctctttcactaaataataaaatacattcactttttaagccatctcgtcctgcacgacccgcttcttgatagtatgattcaagatctccaggcatgttgtaatgaataacataacgaacattagatttatcaatacccattccaaatgcatttgttgcgataacaactttaatacgatcgtatacaaagtcattttgagcttcttctctttctttatttgttaaacctgcatgataaatagcagaagcaatatttatagattctagagattcttgtaattcttctacttgtttacgtgtagaacaataaataatacctgcttgatctttatgagctttagcatattcaataacaaatttttgtctttgatatgtcggatttactttaaaaatgagattacgtcttttggtacttgttttaatttcagcttcttttcggatatttaatttttccataatatcctgttgaacttcggtcgtagctgtagctgtaagagctacaatcgtaaaatcttgaggtagtgtaaacactttgtttatgacgctttgataactaggtctaaaatcatgtccccattttgaaatacagtgagcctcatcaaatgcaattaagttaatatcaatttgactaagcaactttaaaaaatagttactttcaaaacgttcaggtgccacatataaaaattgaatgccttcagtgattaacttattttcaatctcagattgttgttttttatttaaactactatttagataggctgcttcgatacccattgcttttaactgatccacttggtctttcattaaagaaatcaatggacttattactatcgttgtaccacctaacattaaaccaggcacttgataacatattgatttaccaccacctgtaggcaagacacctaatacattatgatgatttaatattttagaaattatctctttttgacctggtctaaacgtatcataaccaaaataatgtgacaaagttgcttccatacttacattccccttattgctcttttatttcttctaattcactccatctcgtgatgtctacatcatatgactgctctagatgttctttttcttcatttaattcttttattttagcgtagtcagcgctcgcttctaccatttcaacatcaatctgctctagtctatgttctgtcgtttcaatacgttccattagggcttcatattcacgtttttctttataagacagtcccgtctttttacgaacgtttgatttagttttaggttgttgagcttgtttttcaagtgtatcctgtcgatctttttcttttttataggcctcataatcttcgaatgttccaataatacgttctaattggccatcgtgaatataccaatattcttgtgctactttatttaaaaaataacgatcatgacttacagtaactactgaccctccgaatgtactaatgtagtcttctaaaattgttaatgtttcagtatcaagatcattggttggctcatcaagtaacagaacattaggttgatgaacaagcaatttcaataaatataatcgtttttgctctccacctgataatttataaatctttttaccatgagcagcactcggaaatagaaatcgctctaacaattgagtaactgaaactgaagtaccatctttttcttttgccacttcactttcttctctcaaatagtcaatcatacgtatatctctatccaaagtttcttctgtttgtttaaaataagctatttttacagtttgaccaacttttaattctccagaataatcagtatcatcttgatttaaaatatttaacattgtcgtcttccctgcaccatttgggccaacaataccaattctttgaccactttgaatgatttctgttacatctttgaataatattttattttgaatctttttcgttaaatgatctaactcaaatacttgtttgcctaatctagaataagcaagattgagttgacctttatctttttgatgatgagattgaacttctgtctctaaatcattaaatcggttaattcgagcttgttgttttgtcgttcttgcttttgcgcctgtacgcatccacgcaagttcttgtttataaagtgctttttgcttttcttgttgtttttgttcaatcacttcattttcagctctcattgcaatgtaatcttcatagtttcctggataagatttaagttttcctctatctaattccacaatacgtgtagcaatctcatttaaaaaatagcgatcatgtgtcacaaataaaactgtatgtggatattgcttaacatagttaattaaccaattaattgattcaaagtctaaatggtttgtaggctcatctaacaataacaaatcaggttgttcaataagcgtcttagctaagacaacacgtttttgttgtccccctgataattctttaacttttttagtcgtattattaatacctaattttgataaaatagttttaatttcagcattgtaatcccatgcatggtgttgatccataagttcttgagcttccatcatttttttaaaattcgcatcgttttgatgttctgtatatatagtcacagcttcttcatatgttttaataatacgtaaagtatctgtatcggaacttagaatagcttgaaatactgtcatatcaccatttaaatgttgcttctgtgaagaataacgaatgcgatactgattaggatgagttatatcggctgaaaaatcttcatctaaactaccaatgacttttaataaagtacttttaccagtaccatttatacctacaagtccaattttttcatgttcagaaatagagagatttaagtcatcaaaaataactttatcagcatatgatttatttagttgttctattttatacgcttccatatttttacttcctttttaatatcgaaatttcaatatatttctgataagcttaattcagttctatatattatacacctttttaatgctaaatgatataaggagaaaatagatatgatagactttttcgaaaatttaccaccttatcttcaagcacttattgccggtattattacttggttattaaccgctttaggtgctgcatcagtctttatttttaagactgtaaacaaaaaaattctaacttctatgcaaggttttgccgctggaattatgattgctgcaagtttttggtctttattacaaccttccattgattatggtacaaatggtcatttacctgcttggttacctgctgcgattggttttattctaggtggtgtgtttattagaggacttgatgcagtcattccacatatacaccaaaaaatcggtgataaaagtcaatatcgagaaggcgttaaaacttctttaagtaaaaatgctttactagtattagctatcactttacacaatattcctgaaggtttatcaattggtgtagcatttggtggaattgcaactggaaatggacaagctaccttttttggagcccttggtttagcaattggtattggtattcagaatattccagaaggagctgctttgtccatgccgattagagccgctggtgcaacacgttttaaagcatttaattatggtcaagcatcagcaatagtagaacctatttttgcaactataggtgccattgcaattatttttatcactccagtactaccttatgcattagcttttgcagcaggagcaatgatttttgtagttgtagaagagcttattcctgattctcaatcgggtaataatacagatttagctacattaagcttaatgcttggttttgtaataatgatgatattagacgtatcattaggataattaaattaaagaataagcctgagacataataaattgttttaggcgttttttatatattggcagtcaattctagtctcggaactccaacataaaaattttcaataagaaagtctacgtctaacgcaagttaagaatacgttgccacaataaaacgacgaattcaaaatgaattctgtcacactccctttcttttttgtttatttttaatgcaactataaaaaacccgtagataaaacttatctacgggcatttaatatagaatgtttattttacacactctctaatattgaattatttttgatttccataaggacctattttgtagtcatattttgacggattaatttttttgaaatctggattattgtagaatctgaataggtcaccatttaatacgtcgtcactcatttctaaatctttttccacctgtttcttatttttttctaaatctttaggtggcgttgttattaattcattatttttatttgaatatactttaccattcacaaatttataatcttttgtgatgaaatcaccattacggaatggaatcacatcattatgatctttagataacatatctgtacccaacattaaataattcttcgagtcaataccaactaaatgtaaaatagtaggcataacatccacttgtccagcatatgtttcatctacagtcccatttttaccaggaatttttaaccagaagccagtacgatttaaatctgtgaatttagctggtgtaatttgctcacccagtaatttttccattgcattgttatggttttcagaaataccataatggtcaccgtaaatcataataactgaatcatcatataatcctttagttttcaaatcattaatatactgttctaaagcttgatctaagtaatgcgccgtttgaatatatccatctacagtagaatcgcctgtattcggcttatcaatacttgcatcttctgaatttaaagtaaatggataatggttagttaatgtaattaaatgggaataaaaaggttgtttcattttagattgatattctgctgatgctttaaagaaaggtttatcttttaaccctaagttcacgacattttcatccgacatatcgtaatatgttgcatcgtaaaatttatctataccaaaatgtttataaatttgatcacggttccaaaatgttttgtaatccccgtgcataacatcagaagtgtaaccttctttttgatctaaaattgctggtaaagattgatatgtgttatctccttttaatgaatacgcagatccttgaggtaaaccatataaactattatccattgtaaattctgaatcagaagttttaccttgtcctgtttgatggaagaagtttggataatatctaaagtcatcgttaccagtcgataatttatttaagaaaggtgtaacttccttaccatttacttttttattaattaaaaatgtttgaaaactttccaaatgtatttttatgatatttttcttcttagcaataccataatattcagggtttggttccgtatttttttgtttcgtataatttaaaacacgagttaaatcatcttcagaagccaatgctttttgttgattgttttgaatcgttttaacaccatcatatacagtaaaattatatggtcctaaatatttaactaaatatttgtgatcaaatgtacgagttaataattcaggtcgatcagtttcagcaaaagctaagtttaaaaagaacaatgcaattgatgctgccatcactactggtacaaactttttactaaatacacgtttgtctaaccaacttcgtttaaaaattaaaataaacagatatacaatcgtatctaagaaatacacaaagtcataccatttaaaagaggcacttactgcgccccccatcgattcaacgttactcgcttgatttaatgtactaaacgttaaaaagtctgagaagaacctaaaataaacaacattagcatagagtaaaaatgttaataagaatcctccaataaaaataaaccaatatgctttcttacctttaaagaacaaaaagatacttaaaataagcgcgattaaactatatggattcatcaatagtattaaattttgaactaatcctttaacacctaaagaaaaatctacatagtatgagaaatacgttttcaaggttactgtaaatacagtcattaagaaaaacgcaaaaagacttatttttcttttgtgtaaactcatgaatgtttcctccgtttatagttattcaaatacggccatttacaaatgctatttttaaaatttaatatattttaaaaacaataaaatttttaattatcatttaataaaagaacattttttatcactacatttaattgttaactatttattaaaaaaatacgaattttgtaatatttttgtaataatacttcatagttcaatatataaatataaagtatttttacttatttatcaagaaaaagctcaagttcagccttcccatttatatacctaatcatttctaaactgttaaactgattgatatattataacgcctaatctattcaatttaatcagactatagtcctatacctttacattaaaaaatatcattaaaatattaatgttcaatattttgatgatatttttattttaacatttctaattgcattcgaaattcgataccatgaaataattgattcgtccaattactaaacttcacagtatttttttcagccgtttcaatatctataaattgaaatttcaaacgagatccttgtggtttttgagctagtttagtcaaatgatagcttgctatagtacctatttgtggataacttccaatagtataatgatcatttaataaaataataggtgtaccatcacgttttacttgaatagtgcccttttttactggttgatactcaggcatatcttcataataggctttgatactaggaccctctagtaacatccctacacgattagacttattcgttactttgtactctccatgtacaaatgtttgttgtgtatcagtatcaaaatcatttgttcctttattagcaatgacatgaaatacatcagaaacgtaattaaacgataaagcataaccatcaattccccaacttgttgttcgctgatgtgctaaattttcaaaaagtttacgatgtcgtgatgtataatcacgtttcatttcaatttcctcgccttcttgaattgttctcccctgaaatcctccaacaccaatatttaaatctgttgaagttgaatttaaccaagaatctaatttaaatcctcctccaatagctaaataaacacgggatgttgtactcgtttctttgaaagacaatacttctcctttttctactaaatacaatttataaggtttaattttcatattttctgtacacgcttcaaagtgatgacctgttaaggcaattaaagtaggctctgtgaatctaattttcgccataatatgtgtcatttctaaagttgcttcgtttttatcatttgctacaagacgattcgcaatttcatgtcctaatgtatctaatgcaccgccagggatgactccctcatattcatacccttggcgtccaaagtcttggaacgtgctaaaaagtccaggtttttctattatgattgacattatttaaaatctcctaattcagtatcatttgggtttttaggatgaaataagacattatctcctaattttaataaattaaagtgatcgcgctctggtgaaaataatttaattggggtatagccaatgactaaccaatcgttataagtatctgtcgttacaatgccacattttttcccttcaataatgacagaacctgcaggcactctttttttcttctgacttgtatgattaacatataatttttcattcattcctgttaaataaggaaagcctggggagtatcccatcatagagacaaagtaatgtgattttgaatgaagttgaataaattcctctttagatagacgatagtattttaatagagcctctaaatcaggtccaaattgatcaccataaaccacaggaatattatgaaaatgacacgctgtttgtttattttcgatatgttctaattcaatttgaattgaatttacaagtgccttcatatattgaaatggcgatgaaatattataatgcttaatcatatctcgagcatcataacaaatcatcatactagactctgtaggtacaatatcagtgatgaaaggtaagtctttatttaataaatgtgtacgtacagcaattaaatttttagttacatcttcagcgacttcttgttcaatatctataataatcgcttggtctccttgactataaattttcattattgcacctcttattacattctaaattatttgaatctatcttattgatgataaaataaatttaataaatgcgtagcatatggcatgatggattgaattaaaagatatactagtacaaattgaaacaacacagtcattgttcctacaatacgcggtagcataattagattatgcttcaaatatcgattgattatatatttacttaaactattgagtaatacgataagtattaaccataataatgtcataaccttctccattattaactaaattaaatttcacaatatctatcaattgtattttatatataaatagatacctgagcaacttcacgtagactattcagtaaataaacttctacttcttcattttccagtttgatcattaattcatctttagtataatctttcaccttaagtttatgattttctaataaactttctctcatacatcctcgtaaaaaatctttattatatcgtggcgtataatagtttccattttctttaatcataatatttccaatatcaaattctaaaattttgccactatcatcatacagtagtatcaaatctgtttcatgattatgcgttaaatatgctctttctgttgttttatttataatgaatttttgtggataatcactgttagattttttaaaacgtgcagtaaaaatgtctttagaagataatggctgaataacgtgagtgaattgtccatctttatcaatttctactttcaaacgatataagcggtcattataattttgttttaaattttcaatataactataccaagcattctctgaaaactgaaaacctaattgtgaacaagaatgacatagtcgacgcgtatgatagtttaaccttggtatatgaccatgattaagttgcattgtttcaaataatttcaatcataactcctccaatattttggttttgtctcgaaattcttgaatttcatttaatggaacagaatcaatggtaattcccgcacctacaccgtaaagagccatattatttcgatattctactgttctaattggaatgttaaaaatcattttatcatctggtaacaataaacctattgtgccgcaataaatatatcttggactggtttctaagtgtttgatataagtcattgtactttgtttaggcgcaccagtgatcgatccacatggaaacattgctgttaaaatcgaatgaagagatatagcatcttctagttgccctgttaccatacttgtcatttgatatacggtttgatacgtttcaataaagaacaatttataaacctcgatggttccagtttttgaaatccttgacatatcattacgtaataaatcaacaatcattacattttctgctctatctttatgagaatacattaatttttcataattcaactgatcttctacactagttttcccacgtggcattgttcctttcatcggcttactaacaatcacgtttgctttatcgttaaatgtacctttttgaaaaaataactctggagaaattgacgcaacttttacttcttcagtatctaataaagctgtatagccaccgttattgttgtgagtcaaataggtatataacattgaaataggataatgcactttactggataaacgagtagtatagttaacttgataagtatctccttctgtaatagcttcttgtattttaataatttttcttctcatttgttcgtcactttcttggaattgaaagtgatgtactgaatgatattgtatattgtccttattattatcagagtttaagggttgattaaaagcgtatgcagcagcatatacttctttttctattaagtgatacgtttctaattgattattaaaaaatggcgctgattcataagttaaatataacgctacataatgcccctttgtctgttgttcttcagcaaattgaataacttcacctacttcttctaaagaataggcaattgattttgaaatatattgatcaaatcgcaattgataatcgatgtagtcatcttcgttagtataataacggtaattaaacgtaatattcatgtatttttcctactttctctataaagtattgaatctgctgatgaccatattcacttaatatagattcaggatgatactgtactgcaaaaataggtagggtatcatgttcaaatgccatcataataccttcattatttgtagctgtagtatttaattgagaaggtaattgttgcctattagcaattaaggaatgataacgcatgacattaaaattttgaggtaaatgtttgaaaagtcctttgcctgtatggattataggtgttgtatgaccatgaacaggctttggtccatgaataatttctcctccataatattcatagatgagttgaaaccctaaacagatacctaatataggtaccgatgaggcatatctatctaaaacgctttttaaaattggatagtcacttggttttcccggacctggagagatgacaatagcctcaattgttaattcttcaagtaatgctacagtcacttctgttacctttaatacctctacacaatgagaggtttctatttttatgtaatcaatcaagttatatgtaaatgaatcattattatctatgactataatcataattatttccaaccttcaaaataatatatttaaaatacaatttttatataagcgcttactttaatattctataaattagcacttgattttaagatatgaatatattaagctatctatcgtataattcgaatataaagaggttcctagctgaaaccctctataaaaaactagacctttgtagaaatatttatacatactttttaatgtacatatgttctacatattttaagtctatctttttatagagataggctttttttatattttatatcaaatgttttcattctatttcatcataaattaaaaatattaacttttaaaggagaaacgttatgccaaacagtgttttgaattctgaaaaagcaattgttgtgtttagtggtggtcaagatagtacaacctgtcttttctatgccaaaagacattttaaagaagttgaacttgtcacattcaattatgggcaaagacataatacagaaatcgaagtagcttctaaaatagcaaaagatcaagggttgaaacatcatattttagacatgtctttactatcccaacttactccaaatgcattaacaaaacatgacatgacaattgagacaggggaagatggtataccaaatacttttgtacctgctcgtaatttattatttttatcatttgctggggctcttgcctatcaagtgaatgcgaaacacatcattactggtgtatgtgaaacagacttctctggttacccagattgccgagatagttttattaaatctatgaatgtcacacttagtttatctatggatagagattttgttattcatacacctttaatgtggttagataaagcgcaaacttgggaactcagtgatgaattaggtgttctcaattatgtgcgtcacaatacgcttacatgctacaacggtattattggagatggatgcggaaaatgtccagcttgtaaattaagacaacgtggacttcatcaatatttagaacaaaaaggagatgcgtcattatgatacaacaagtttatcctacagtgaatcacccttatacatttgaattaaataaagatttcaatttttcagcagcacattttattcctagtgaagatgctggaaaatgcatgagaacacatggacatacttattttgttaacttaactattgttggagatgcactcgaccataatggatttttaattaattttagggaattaaaacgattggtccatgaccaatttgatcactatttattaaatgagttacctcaatttaaagataaaagtccttctactgaaattgtggcacagacaatttttgaaatcgtacaagctcatcttaacgagtatgacaataaacctaaatgtgtacaagtttatttacgtgaaacaccatcaagttatgttgtctatcgtccaaaggagattaaataatgccttcaaaaataccagttttagaaattttcggacctactattcaaggagaaggacgagttataggacgaaaaacaatgtttgtccgcacagcaggatgcgattatcgttgtagttggtgcgattccgcctttacgtgggatggtagcgctaaagatgatatagagttattaactgctcaagacatttatgatcgtttaaaagaaattggcggtaatcaatttgatcatgtcactatttctggaggtaaccctgcattaatcaaagggattcaagatttagtagatttatttgaagaaaaaaatatttttacggcattagaaacccaaggcagtaaatttcaaccttggatgcgacaaattaacgatttaacaattagtcctaaaccgccaagctctaatatggtgcctaatttagaaatattagatagtgtcatagaacaatgtataccatcaacattgaacttgaaagtagttgtttttgataaagaagattatcaatttgctaaaatgattcatcatcgttatcctaatattccattttatttgcaagtaggaaatccctatttagatgatgatgttgaatatcataccgaaaaattacttggtcgctatgaaactcttgtagacacagtaatgaatagcagtgatatgaatcatgtgtatgttttacctcagttacatacattgttatggagtaataagaaaggtgtataattagtaaattataatagaataatatttattaagtgttttgaaatgattaagtttattttaattgctataatattttaatgaactacacacacgtgataggagtacaacatgattatatatgtatttattaatatagccattaccatatgtgttctgggctttgatttatatcggcatcatttcaaacaactaacgtttaactccgttctattatccattgttatcaatgctattattaatagtgttgtgattgaaaagttcaattttataacatttgcttcaattatatttttcttaagttggacaatcttacaatattatttaaatcgtaaacatatatacttaatgatttcagagtataaatctcttgcattcatttttgcaattatgattagttgctcattatttatcacttttgaatctagcgaccaatcagtctatatgtctattccttatttagctccagctatatttatcataggcttaagcattgatttcataagtactttttcaaaaaatgaaatgaatcatcttaaatttttgagtaagctacaacaccctattatgattggtcatacaattattattatttcaattatacttttgactttattaacatcattttggtatatcttcataattatttatgctttatttgatatatatttattatggcaactaaaacataataattttgaaaatgacttaaaaaaataaacatgtaagaagctatgatgtaagagcttttacatgtttatttttttattgataaattttttctttttctgcaactactttttcaataggtgtttttaaattggaagcttccacaatatattttggtctttgttttacttcgtaataaattcgcccaatatattcgccaacgacaccaatagacattaactgaatgccacctaataacaatacagctgctattgttgtaaagtaacctggatgattaattccattcattaaaatacctattaacaaataaataatataaatgatgcttaatccaaagataaacattccaagatatatcattgctctcagtggtttattattaaatgatattaatccatcaatcccataatttaataacttggtaaatgtccatttagattctccagcttctcgttctacatttttataagtaaagatctttgtattataccctatccattcaaataatcctttagaaaatcgattatattcatttaatgaaacaatcgatttaactgcacgttgacttaataatcgaaaatcgcctacaccatcactaaatttaatatcttcgacaaagctattaatgagcttatagtacaactttgacaatgttttacgtgcaatattttcaccactacgatctcgtttagcgacaacttgatcaaaaccttgttgatatatttcaatcattttaggtataaattccggaggatgttgtaaatctccatcaatcattacgactgcatcaacattcacactgtgttgaaaaccagcaatcattgctgcttctttaccaaaatttcgactaaaagaaatatatttaacatgttcatcgtattccgctaaattttgtatatgctcaatcgtattatctttactaccatcatcaataaataacaagtcataataataacgacgagttttactattctccgtcaaaatttcagtcaatctatcgtaagttttttttacgactttaccttcattgaagcaaggtataatgactctgattttcatctaattacatccttttctacattctttctaatattgtatcaataaaatcaataaatattctactaataaccatgtaattaacaaataattaatattaactctagcttttgtaataattaaactatattattttaaatcacctattgctacatcatctggatctttaccttgacgtgcatttctatttaaactatcaatttctgcaatctcagtaagttctaaattaaagtcaaaaatatcaaaattttcacgaatacgagatggcgttttggatttaggaataataattctgtcatgagctagatgccaacgtaatacaatttgtgctggtgttttgtcatattgttctgctaattttgtaattactggatcatctaataatccacgatttctcataagtggcatccaagctgtgacagtaatatcatgtttatcacaataatcttgtacatcttgttgattaaaataaggatgaacttctatttgattaatttgaggtacaatagttgtctctttcatcaaagtttctaagtgatagggtttaaagttacatacaccaatcgctttaattttaccttcgttatataatttttctaatgctttataagattcaatatataagccatctttttcacatggccaatgaattaaatataaatctaagtaatccaatcctaagttttctaaagatttattaaaatattctaatgtattgtcatatccttgataatcattccataatttagaagtaataaatacatcttctctcgcaatatcactgttgtttaaagctttacctagcgcttgttcattaccgtaaaaatatgcagtatcaaatgcacgatatcccgcttctaatgctatttgtactgcggtttccatctcattatcttccattttataaacacctagtcctactttaggcattgggtaaccattatttaacacttgtgtatcatttaccatttgtgccacatcctattcaatataaatttctcaactaaaaattagcataacttaatttcttttacgcatacaaataaagacaattaggtttacatacccaagtgcctttattttattcatccgattcatttttatgatcgtgattttcttcttcctcttcatcactaatcacaggtcttgtttcattaaattggtatttaagtacaacccataccaattgatgattatccatttcagaaacaatccatcgatcatattttgtatctatatagtcttcaacttgaagattagtattgtgtgcttgtagccatccaccaattgtatcgatatcttcagaatcttcaaaagtgatatcaaatttttcatgtaaatcatcaagtaagacacgtccgttaatttgatatataccttcctctaatttaacaatatcatttatttcatcatcatcaaattcatctctgatttcaccaacaatctcttcaagaatatcttccattgttagaataccagcagtaccaccatattcgtcaataataagactaatatgaacatgttcacgttgcattgaaactaatgcatcgctaatacgagttgtttctgaaatcataggtagttcatgaatataattagagattttaattgttttacctgaagcatattctgttaaaaattctttcacattaataaaaccttttatatggtctttatccccatcttcagtaattggataacgtgtaaattgatgttctttaatcgtgtcaagtaattcgtcaacattaaatggttcgtttaacgttaccatttgtgtacgtggaaccatgatatctttcgcatgtctttcgtcaaatgaaaagatattttgcatgtaattcagttctgtttgattaatttctccaccattataactattattaataatgattttaatttcttcctcagacattgcatctgcttgcgcatcagggtcaacaccaagcattctaataattactcgtgccgaaccattcattaaccatattaatggcttcatgatattaccaaaataatataatggtctagcataagttaatgctaatttttcagtatgttgtattgctattgatttaggtgctaactcacctaacactacatgtaaataagttacaacaataaacgaaatcacaaatgaaatggttgtagtcactgcacttggcaaatgtaatagattaaaaagtggatgtaatagtttttcgaatgtcggttcacctaaccaacctaaacctaaagatgtaactgtaataccaagttgacatgctgataaataataatcaagattagcaatcatctttttaacaatttttgcacttccattaccttcatcagcaagttgttcaattcttgttgaacgtacttttactaatgcaaattcagatccaacgaatacggttgttaaagcgattaatagaaaaaatattactaaattaattatggtcactgtttccaattagttccctatttctagggattcacctccaaatattatgtgtctctaatgagtaacacgaatttaatacgtcatacttatcaccgttataaacgcatgttaagaccttcccattaagacacccccaaaaaaaatgtattactttaatattaccatatttctatactaaatggttaaataagaataagaaagcttttaacatttaaaatcatttaaaaagcattatataatgattttcttactactatttcatatatacttcaatagtccttgtaataaatttttaagaaaatcagagaaatgatatgtgaggaatttttaattaaatgctataaaagtacaataatactccaggatggttatttgtttcttaaactcaaattcccatttaaacctaatctgtagtaatagtcaagtacatatatatctatgtctttttaattatatactaactatataataaaagattggacagaattcgttaatcccttcgataatgtaaacccagctttcgttgagcgttgggtttctcaggaaaccctttttgctgaggccccaaccccagctttcgttgaacattgggtttcctagaaaaccctttttgttggcactccaccccaaatttctttgaacattgcttttttacaaagatttcgatgctagtactccttgaaataatcttgatacaacacgttttcaattcaatgaccaaatatcaatatataaaaaaatgcctgagacaactcattatgtctcaggctcattaaattaatgtttattattcatccatagattctgaagctttaatttcttgttctgttaattttggtttcagtaaaccataaagtactgctgaaacaagtgtacctataattaaagcaatgatagtttggataatatgactaaagtctgtggctgctataacgatgataccaccatgaggtgcattaattcttgaaccaagtcctaatgcaatcgctccagcaacacctgaaccgaccatcattgatggaatcacacgtaatgggtcagcagctgcaaaaggtatagcaccttctgtgatgaatgatagacccataacatagttaggtacgattgagccacgttgctcttttgtaaatttacgtttaaagataaacattgctgtggcaattgctaatggtggaatcataccaccaaccattgctgctgttattggtgcagcattaccttcagttaaagctgctgtcgcaaatacataagctgctttattgaatggacctcccatatcaattgccatcatagctccaataactagtcctaatagcataatgttagaaccagataaactatttaaaccatttaataatagattgtttaaccatgctgcaggtggattaaatacataaatcattaataatccagtaattgtcacacttaatagtggataaattaatgttggttttaaaccttcaactgcttgaggtaaattacgagtaatatatttgataccttgtgttaaataacccgctaagaaaccagcaataataccaccgataaacccagagccaccagaaattgctaacataccgccaactaagccagctgcaaaacctggtttatctgcaatactacgagaaatgaaaccagctaagattggaataattaatgcaaaggcactcttattaccaatattccacaattgttctgcaaacgcattgtgttcaggactttttggatcaaatgagttggcgccaaataagaatacaatcgccattaatataccaccagcaataacaagtggtaacatattagaaacaccattcattaagtgtttataaaatgctttacctggacttaatttttcatcattactatctttatctgtatttttttgtccaccatgtgctttaaatggttttctacttgtatcaagtgctgtattaattaactcttcaggacgtttaatcccgtctgctactggaacctcaattacatttttaccatcgaaacgatctgtttctacatgaacatcggcagctacaataatcccagttgcacgttcaatatcttgttgagttaaatggtttttaataccacttgaaccatttgtttcaacttttattttcactcccattttttctgcttgttttttcaaagcatcacgggccatatacgtatgtgcaatacctgttggacacgctgttacagctaaaacataaggttcgttagcattataattcgctgatgcgccagttgttgtttgtgcttcagtctcttgttcttgagcttctttttcttcttctttagttgcttcatcatcagcatcatcaataatacgaagtatttcttctttcgaattagcctgtaatagattttctcttactgtatcgtccattaaaatgcctgacaatttagctaatgcatctaaatgtgtttgtgcgccaccctctggtgctgcaatcataaagaataaatgcgcaggttgaccatctaaactttgatagtccacaccttcttttgatttaccaaaagcaatcgcaggtgatgtcactgctgctactttagcatgtggaatggctattccttcaccaattcccgttgtactttgtgactcacgattatgaatcgcttccttaaattgagctatatcgcttaatttaccagctgaatctaattgattaactaattcatcaatgacgccgtttttatcactagctgataaatccatagcaatagtttctttagtaagtaattctgttattctcatctctatcactccccatcaagtacagaaattgtaacttgtgacttgattttttctatatcttctcttaatgctaagtcatcattaaatgccgtagccgtacctgaagctactgcttggcaaaatgcttcttcaagtgatagtcccaactcaagacccgctaccatacctgcaactgtactgtcaccagatcctactgtatttacaacttcacctttaggattttgggctttaatacttcttgtctcgtcaacatatatggcaccatctccacctaaagaaataatgacagattgagctccattttttactatttctctaccatacttaacgacatcttgatctgatttaattgtgacatcaaacatttcttctaattcatctttattcggtttaataaataaaggatgatattctaacactgtattaactaaatctctttcagcatccactactaattttgcacctgtttcttgagtgatttttgcaatttgagcataagcatcactcggaatactttttggaacacttcctgctacaatgacagtgtcctccttagaagtatgtctgatctgatttaataatgcttcaaactgctcagacgtcacattcggaccaggtgcattaatttcagtttcatcgccggattttaatttaacattaatacgagtatcttcatttactttaataaactccgtattaatatcgctttgttccaaaatgctagaaataaattccccaggaaaacctccagcaaatcctaatgccgtagatgaaacatctaaggttttcaacacgcgagaaacattaataccttttccaccagcaaatttgtatgtttctctagctctattaagcccttttagctcaaatccatcagtaaacatgatgtaatcaatagatggattaaatgtcactgtatatatcataattaacctcctaaaaagtggtatttctctttgtattcgttgtagcgattatgatgacgtaattgctcagatacgatgtactcaacatggcatgctttggttgagacatgcgcaaaatatgtttcatctaattttgaatggtctaataaaacataagatgtggttgcttgatgtattgctctttctttaattaatgcttctttttcatctggtgtggttaatccatgattcaaatctaagccattcatacctatgaaagctttatcaaaacaataacgtcttaaaacttcaagggcacttgctccgacagtagcaaaagtggtagcttttacttctccaccaatcatcaaggttttaatacctcgatgaagtaatctttcaacgtgagacaatccgtttgtaaccactacgatatcttgtgcttttataaatggaatcatctcaattgtagatgaacctgcatccataaaaatacaatcattatcttcaatgagctgagctgcctttcttccaatttctcttttttcttttagatttgtagacagtttttcagataaaataggttcttggtttctatgactattaagtgttgcaccaccatgaacgcgttgaagacgtccaagttgttgtaactttgataaatctcttcttatagttgaagcactacaacctgttcgttcaattaactcttggagtgataaaaaatcttttttcttaagttcttgtaaaattaaactttgtcgtttttcagaaatcatctttaacactcctttacaacttttattatagtgtttacgcttacatatttcaatcaaaaattatcaaaaacgttcaaaaacgttcaaaaaaccgaaaaattaacagagtgttcacaatgtatatcattgctcactctgctaatacatttaatgttgagtaatacgtgctgtttgtgcctgtgtaactgcaattaaatcattaggttcaagtataatttgcatgcctcgttgaccaccactcacattgattttgtctcgtgataaagctgactcatcaataatcgttggaaacgaatgtttcatccctattggagaacaccctcctcttatatagccagtaactttttttaaatcatccatcggcatcaaattaagtttcttttcacctatgacatgtgccgcttcttttaagtctaatgtttcactaactggtataacacatacaaaatgatcatgattagcattttctaacactaacgttttataaacgtctttcacattcgcatgcactaattccgcaattgtttctccatctaaatgttcttcacctatttcaaatgtatttactgaataattaatcttagctctatcaagcattctcattgcattggttttcttatgtttcaatgtaacacctcatttatcttctttatatatctaattttactactcattgtgacaaataaaaaatagagtaagatagaaacctttagatttcactttcttactctgattttacattacatttttatttaacttaatttgcagaaattatctcaactttacccactttattaattgttatatcttcagcttttttgttttctggatacgcttcaaaagtgatggcttgattagtttcattcaaacgctctaactttacaggctgtttataattttgttgcatataattttcaattatcgttttacattcctctgttgagtataaatatttttcttgagctttctcatttaacctataattaacgttttgattttgacgaatatctgctttgtgttgcgtttgatttttctcagaagcttcggcggtgtgattgctgtttatatttaatatatttttagtttcgacaatacttccgacttttgaaaaagtagaaattgttcgatgtaccttagctaaggcattttgattcgttgcgataaataatagaaatgccaaacaaattgataaaatgatagctaccacacttaacaatatattttttaaattcatctccttacccacacttctctttgaatttttttatatcttaacatacaaatatagataaaataattcagtagaaggcaatttaaaataattgtaatctttgtaacagttatattacctaacgactttttattgttacatttctattatataaaacttatttaatcacatctgctacgatttaactttaactttttctctatgaaaataattactaccccaaataacattacaataatagacatatataaaggaaattcaatattaacatcaaataacgagcctgctaccaatgggcctacaaaattacccatacttgtaaatgtagaattaagtcctccagcaaaactttgtcgattacctgctatatttgaataataattagttagcgctggacgaattaaatcaaatccaataaagacaataaaactaattaacataattgaccagtaactatgagcgattataagactaaatataacaatgacagaatataataatgcccaagtaataaatgtaagttcagtggtatatctcataaatttatcaaaaaagaaaatttggaatactgctcctgcaacaccaccacctacaatagcaattgaaatatcgccaggtgcgtagtttgctttcgctgaagtatatagagaaaataacgtctcaaaagaagacaaaccaaaagcaagtacaaacgttaagataattggagtaataaaaacaccccattggattttagaaagttctttagtttcaaagtgaatatgatgacttttcgctgtattttgcggttggcgaatcaatattacagatataacaaacgcaataatacctaatgcacctgcaaaataaaatggaagacgatgtgatacttctgctaaaaaaccaccaattcctggtcctaaaataaaaccagagttaataattgcagacatataaccaaaatttttcgctttatctttagctatagaaatatctgcaatcattcctgttacaccaggcatgaccatccctgcactaaaaccaccaagtattcttgatactattagaagtataaaagaatgactcatagcaaataagaattcagagattgtaaaaaatactaatcctaaacaaataattaattttttacccaatttatcagctaaacttcctccaaaaggagaaataatcatttgagacaatgagaaaatagctactaaaattcctaaatcgcttccttttaatcctaaatctttcaaatatactggaagaacaggaataacaaggccaattccaacgaatattaaaaatatattaaaatataatgtaaataattgttttttcatgaagatcacctctcttttatctataattaaatactcttaatgaaattcatctaattcatattctgagaaaagttaaaaattctaaatttttcatctttcatttagatactattatatattattttttattttaaaatatactatcttacttaatagtttattcaaagtattttaaatttatgttatatataattaaattatcctaattataaaaatgaagacaataagatgcccaaaaaatggacaacactctcttcttgttttagaacatggagaagatattataaaagaggttactcactttgctcaacattaacatattaaatttgattcagtgagtggtatcggaggttgtgatgagatcgtgttaaactattataatttagaaacaaatgaatatgaaaaaaagaaataaatgaaacattagagtgaacaagtttattagggaatatttctcgtattgataattaaccatttgcacatttacatggtacattggttctcaatattttgagacgttaagtggacatttaacaaaagctgtgatttcaacaacaggtgaaattttcattacgatgattgattgtgatatcaatcgaacgtttgactcgtagactagactcaactgattaaaatcgtaaaatttctctttcaatcaagattagaaacctcaattcaaccgcttcattacaatatgttatcacttttatttaacatcattgagattcttttcttacagattacacatctattttacaattattaatgcttctctaacttttattattctaccttcttttttcttgattacttcgactttaacctttactataataattcaactaaatcgttagaaagtagtgcatattatgacttcacgttatattgcaagaatctattttattattctttttgtaatatcattatttgaaacgcgtgtatttaactttgtaagcttaaatttatttttagcttacattccacttgaattatgtttcttattagatttatttaaacctagaaaaaagtttgaatggcctatatttattatttttgctcttatttttattttattagtacccaatacattttacatggttactgatcttattcatctcaatcagtttacatttgatttttacgtccaacttaatttaatagaatggttatactttactttcttactgctaagtgtattttttgcgatttattgcatggctctcatatttgttcatttatctcatttcacttcaaagctatggttaaatcgatgtttattaatagcacttatgtttttaaatggtttaggaatatttatgggtagatttttgagatttcatactgttcatttaattacccgtccatttactattatcacagaagtcattagtgccttaaatggtagtagtttaatatttatttcattaatgatgctactgcaatttgtcattttattattcattaaagggataagaatggcacattgatatatttctatttaatacagtctattcatgtagaaaaattttataagacgtttagttatgtatttaaaaaagctaggggtgggagcatgaactcaatttgaactctgtttcctttccctagctctttttttatatatttttaaatattgtcatcacatgttcgcgcgcaactttatgatctacaattggttcaggataatctttacctaattgtattcctttttttactaattgcgtttgatgttgaaatggatgatgtaagaattttgcgggcacatgatcgaatataggaatatattttttgatatataaagcgtctttatcaaaacgttcgctttgtctagtaggattaaacatcctaaaatacggcacagcatctgtcccagttgaagctgaccattgccaaccatgtacatttgaagctgcatcataatcgattaattttttcataaaataatcttcgccccaagcccaatcaataaacaaatctttagttaaaaattgagagactaccatccgcatgcgattatgcataaatcctgtctcatttaattcattcatagcagcatcaataataggaaaaccagttttaccttcacaccagcgattaaactcttctttgttataagaccattgtatagtacgatatttttcattaaatgcttcatgtgcaatatgaggatattgagccataagaacataataaaactcacgaaacattacttctctaataaaactttcgtaattattttcattttcctcatatccttctaataaatctgtaataatttgtttaatatctatcagaccatatgctagaacaatactcaattgactagtgagcacttctggaagatactctctatcctttttatagttttgaatactatgattcaaataatccttccaattatttaatgcttgatcttctgattgtccatcatgatgataatcattagttatcgtttgttgtgattggctacatttattagcgatatcacttaaatgatattgatacgaagaatgctgtctaagttttgaacggtgtgctttataaaaacttgtaaatactttatatggttgtccttgctgattcatcgtgttacttggcttaaaataatgattaacgttaatagttattacgggtatatcgtgatttttaaatgcttgttttaagtgtcgaatatcatatctttcttgatgataactcatgatatcgcctgccataactatttctttaatatcatgttcagtacaaaacatacctagttcactataatcgatgacatatggttctatatgatgttctttcaacttatgtaaaaatttttctaaagtgccataataataatttgcctttttatctgtacctttctcttcaaatatttccttaggaattataagatagcatttatcaaatgcatctttttgttgattaatatattcgaataatggattattatttattctaaatactctattgagaatgacgccaatattcatattttcactcctagactgatgtttgttaataatttaactaccctatttatcttaaaattaaaaggagtgactatagaattcaatacaaattctaaagtgactcctttcacttaatttatataatgtgattaatacttttattaaccaaatatttctctattaagtccaaaaacgtatagtaaagtaaagaaagttgctgcacttaaaatagttaaaattagcgttaatatgagtgtacgtttgtacttattaataaatgcgataaacaatattcctaaattataaccaaagaacaatccaaatagtgccattgtgatttttatatttgtaaaaaagatatttaacaatagaataataattgcaaaaattaaatatgggattgtaatccacttaaactcaaagcgaatttgtttagtgcgtttatcttcattatgattcattaatatatcctccttattctattataaatgatatatttttttattctcatgacaagactatgacatatttattagaaatttagaatactcataaccactcccataaaaattaaggagtcattttaagtaaattgaatcatttctaactggtttttcaaacgtgttgtatcaagcatttcaccaataataacaatagttaatggaacttctctatcagttattccataagtaggtaatcccattgaaaattggaattcgtatgttgaatccgactgatctttaaattttacaaatccttttaatctgaacacttcatctggcaaacacattataaattggtaaaataattgtcgatcaataggagaactaaacgtatatttcatagattgtacattatgatggtggacatgaacatgcctattaatatcagcagctttatttttcactactacatcatctaatttactatatgtagtcacgtaaatcattgctttattattaatagaaaccaattgtttttttatattttctaattctacttgggtcactaaatccattttattaagaataattatatcactatatttaatttgctcttccattaactcattcgtctctaccgtatatttcattctattattaaatcttaacgcatcaacaagacctattattttaggaatttccacgtcattaactattgttggatcttgacacgctgcaaaaacttctaaaggatgtgcaattccagtcgattcaataagaatgtgttgactttcaccttctttaataagtgattgtaattgtaatactaaatcattatttaagttacaacatacgcatccattgattaatgattttacagtaatatcttcttcgataagtaaactatcaacgtcaaaagaaccgaattcattcataataatcgttattttctcatctttttttaataattggcgtatataattattcaaaagtgtagttttaccacttcctaaaaagccactaattattgtaatagatattttttgttttttattatttatcattttaaaaactcatttctatataaaatgtatttgaaattaatattataaaaatgtacgttagattacacttgattaaaatagggttttcttctaaaatttaagcatactttaattttagcatggcattgaaatgaagtgtgtgataatttatattttacacaacatagacgaactttaatccgaaataaagagaaacggataaatgtctggaggagaactttaatgtctgaacaacacaatttaaaaaagcaactttgttttagtttgtacaatgcacaaagacaagtaaatcgctactattcaaacaaagtctttaaaaagtacaatcttacttacccacaattcttagttttaaatattttatgggaagaatcccctgtaaatgttaagaaagtagtcactgaattagctttagatacaggtacagtatcacccttactaaaaagaatggagaacgttgatttaattaaacgggaacgttctgaaattgaccaacgtgaagtatttattcatcttactgaaaaaagtgaaaatattaaacccgaattaagtgatgcatctcaaaaagttgccatcgcttcttctttgagtaacgatgaagtccatgaacttaatcgtctattaggtaaaattattactgcttttaccgaaaacaaataatgtgacatgctagtactaaactaattaaagttattcatttcaaaatgtaatttatatatttatcaatagtagaaaacctgagatcattttttaaagctatctcaggttttttattttataatttattaatatgaatcatgcgatttaaataacccttattttgacttaatgatacataatctccgtactcaacaacctcaccttcaaccattacgataatggtatcgaaatatggaagtaagtctaaatcatgtgtagcaacaactaatgtttctgcttgcttgttaatttctttcattacattggtcgtattatcttcatcaagcgctgtagttggctcatctaatagccaaatgttagatgattttaaaaataaacgtgctaaagataaacgttgaatttcaccgccagataaagaagttccatctaaagtcaattgcgttttcaaatttaagtaacttaaattcaacatatttaaaacatcgattaagttttcatctttttgattagataataaattttctctaacagtaccatcaaatatttgttgggattgtaataacgcattgatttcattatatctatcgttttcattaatttgagtaatagattgtccgtataactcaacacgaccttcttctatttcatataatccacatagcagttgcattaacgtacttttccctgaaccagaaggtccaatgatagctactttttcacctttatggatggttaaattaatatcgtttaatactaatgtttcttgattaaaatatttaaagtttagattacaaatactaaatacaggttcttgtttcgtctgtacagttaacttaggtgtagtgatcgaagaatgaaacacctcattaatatctgttaacgcttgatctgtatctgctttataataagcaaaattactcattggaatagcctgttcgaacaaagttaaaatcattaatatcatactcgttacatatataacatctaaatatccatgttcaatttgtaccacggctaaagctaaacttaaaaaaatcgttataatagaaatgagattcaatatataatcataaaatgttaaaaaacgattttctttagcttgtaatctatcatagtattctaatgacttaacgactttctttttatatgcatcttgttgattaaaagtaattaactcttgataacccgctttataatcataaaactcacctaacattttttgttcatgagtagtaatttgttgtttaagtatgcgtacacgcttagcacttagccatggtataatccataaataaaatagcatacttatgacaattaaaatagcatgagcaatactaaaataaattaatgcaacagcagcaattagcgcagttaaacctattacaaaaggaggataatatacacgtaaatatatattttgtagtgcctctactttattgaccattcttgagattaaatcgctcgatctaaatttacgataaatattaggcactcttggaaaaagttgctttacaaactgtactcttatattccttaacattgtaaatgtagttcgatgggataataacctttcaacatatcgcgtcatagcacgtaaaaatccaaataattttacagaaacgacaagtatcatcaatgcgtaaataggcatgcctagtgcactttgagttaccatatatccacttaaaaagaacattgtaagtgctattaggcttccggtaatgcttactaatattgctaaaaataaatctttatctaaatgaaatttaatatgtggtttcatctttatgcaccaccttatttaattgcgtagaaatttgattatcatctttaataagatgaccttcttttacatataaacgtcgggttgcacgacgtatagtcgaattacgatgtgcgattgtaattgtggtagcatgcttaaagttatgctctaatgtttgttgaacaacacgttcagtttcaatatctaaacctgtagtaggctcgtcaaatattagaatacttggacgtagtaatagtactctacaaagttctattcttctcatttgaccaccagataacatttccccaccttcaccaattacagtgtgaattcctttatttaagcttaaaatcttttctttaagtcctactgtttctaaagtttgtaaaattttttcatctgaaacctcattaaacattgtaatattatctttaacagacgctgaaaaaatatatggccgttggtttaacatacctatatctgtaacttcagaattaaatataatgcgaccttttgtaggtgttatcatttgctgaataagattcgctaatgtggattttccagcgccacttggaccaacaattgcaattttttctccttgattgatcgaaaaagttatatcttttaaggcatatagagtcgtattaggatattgataacttactttatcgaaataaatttgattttgctgattctgatttatggtaggcgtgttgatatttgattcttcaacattatttaaaaaatcaaaaataatatcacttgctccttcactttgtttaccagtatggaaggcttgacctaaatctttaattgcattgtaaaattctggcgctaaaataatcgcaattacagcaattttaaagttgatatggtgaaacacgactaaacttaacgtcgcttctagtgcaattaaaccaatacctaacatacttataaactcaagcataaggccagatagaaatgcacttttcaaaattttcatcgttaaatccctaaagcgtgtgctctctttatatatgcgattttccgtttccgttgttcgtctaaatagtcttaaagtaatcaaacctttagctatatttaaaaagcgttggctaaattgatttaaatacgtcatttgttctttagattcgtctcgtgttttcaagccaaaaataatataaaataatggaataaatggtgcagtaaccgccataataatagcagtattaagatgtataaaacacattacaataataatgacgaaaggtatgaacatagatttaaacacttgtggcaagtaattattaaaaaagggtgtaattccatctataacttcagttaaaatgtttgtttgtacgccaattgaagctttagacttacttgttactattttttgacgaaggtcatgtttaactttgtaagctaaaatatcacctaatcgttgattcaacatattaaacgttactctcaaaattaatacgattaaaatagtaaataacaatggataaatagctgaaaccttgtggtacaagacttgattcaaaaactcagcaattccaatattttgaatcactacacatatggctaacaatacactaatcatccccataaaaattggaaataatttatatttaaagactaaactcattaaatttttcaaatttcttcacctaatgctttattatagaagcttgatcacaaataatcatttaattgatttcaaagttaagtgacaatattatgtcatttctttgaattaatcatcttccacacaatacaacaaaatagtttttttatttcaaaacaacatgacattattgtcatatccaccggtaattattagtaaattattatttcaatatgctatgataataaagtgaattttttaaaataaaacatttagcataaatgaaagttcattttttacataaaagaaagaggttacttatgataattattgaatttattaaggcgttaattttaggtattgtagaaggtcttactgaatttgctcctgtttcatctacaggacatatgattcttgtagatgatatgtggttacaatcgtctcaatttttaggttctcattcagcttttacttttaaaattgtcattcaactcggttctgtgtttgctgctgcatgggtgttccgtgaacgttacttcgaaatgttacatatcggaaaatacaaacatgttgctcatagtgagggaatgcgttctaaacctcgccgattgaacttactccatgtattagtaggtatgattccagctggaattttaggtgttctttttgatgactttattgaagcgcatttatttagtgtacccactgtaatgattggtttattcattggtgctatttatatgattattgctgataaatacagtactaaagtaaagcacccgcaaacagtcgatcaaattaattatttccaagcatttgtcattggtatttctcaagcagttgcaatgtggcctggtttcagtagatctggatcaacaatttctactggggtattaatgaaactcaatcataaatctgcttctgatttcacgtttattatggcagtcccaattatgttagctgcaagtgcattatcattacttaaaaattatcaatatattgatcttgcacatgtcccattttatattattggattcttagcagcatttattgtcggtttaattgcaattaaaacgttcttacatttaattaataaagtgaagttagtaccatttgcgatttatcgaatcgtactagttattttcattgctattctttatttcggattcggtattggtaaaggtatttaatgatatcacactaaaattcaaaaagaattttagtgtttttttataaaaattttagataactattttaatctagtgcaatcgtttgaattcctgtatcatagggtaatgaaagagaaagaaaattttatgggggcaacgagtatggacaaaaaacaagttattaaaacagcaattaacgtgttaccgatatttatcgtaccactagttgtagaacgtaaaaaaattaagtctcatccagatgttcaaaaagcttcgcatgcaacttcacatgctacacatacggtagcaaataaggcatctagtgttaaagattactttggtgataaaaaacaagagttcgataataagcgtgaactcaaaaaaattgctaaagaaaatgatcctaaatatattaagaaaaaaggatcaaaattagctaaaaagaaccataaacaatcttctaaattagagaaaaaacttcaaaaaaatattgataaacgtcataaagaagaagaaaaaattcaaaaacataatgaaaaacagcgaattaaagaaatgaagaaatatgataactataatgctgacagtattattactcaagataaagcgttacattcagaaaaggttacaaataaataatgacaaccatatttgttgatggtgatgcttgtccagtcgttaatgaaattattgatttaacagctgagacaggcttttttgttacgattttacggagctttagtcatttttctcattctcattatccaagtcatgtaaatatactatacgttgacgatggaccagatgcagttgattacaaaattatacaacttgtaacaacgagtgatattgtgattactcaagactatggattagctagtttattactaaagaaagctagaattataatgcatcataaaggatttatctataacgaaaataatatagatatattacttcaacagcgttataataatgcacaaattagaaaacaaggtggacgtcataaaggaccctcccctttttcaaaagcagatcgacagcatttttgtaatgtttttcaaaccttacttaatcaattaatggaggatacaaaatgaaacgtatagcagtatattgtggagcaagtaaagggaataatcccatttatattaaagaagcgtatcaattaggaaaatatatggctgaacaaggttatgaactcatttttggagctggttcagtaggtatcatgggcgctattcaagacggcgtactagattacggaggccatgcaattggagtcatgcctaaaatgttagatgaacgtgaaattactagtcaaaaagtaagtgagctcattcttgtagactcaatgcacgaacgcaaagaaaaaatgactgaattagcagatgcttttgttatggcaccaggaggagctggttctcttgaagaatttttcgaaatgtatagctgggcacaaattggtatacatcaaaaaccaatcggcatctttaatttaaatggattctttaatccgcttcaaactttgattgatcatatgattgaagaaggttttatcgataaaaaatataaagcgttagcacctttatatgacactaaagaggctctaattgatggattacttaattataaatctcttggtgttagaacctatgattgattaatactataaaaaagatgggccaacgaattctttttgaattcgttggctcatcctggtttcggcacccaaatgtagagactttcgtgttgagtgtttctatatttaggtttaggactagcaataaatttgttttttatcgtcacattttttatgtagcccatgacttttaatatgctaaaaaacctctgggttttctatctattttctagtctttattaatatttatatgtttaactttttttgatatcttacatgtcttttaagtggatgatgtttacttagttcagatagttcaaaataatcaaataatgacattccaattttttccattacttttcgagaggccaaattcccctcagcagtgagactaaatacttcttctatgcctttttcttttgcatactctaaaacagccatagcaccttcagtagcaataccattcccccatacttcagggataagtcgccatccaatttcatatataggtaaattttcaaaaggatatttactatcttttggtaagtagtttaaccctatatatcctaaccatgctcctgtctctttaagctcaacagcaaacagcccaattcctttttcctttaaaatgtcatccatttgttgcatatctaattctgaacgtctataacttaatagacttggaaaatagcgtcttacctgaggatttgcattcattttttgaaaagataataaatctttttcttcccaatcacgcaatctcaatctttctgtttctatataaacaaccatttatccacactccattacccaaatacaattatgaaaaaagtgtgacatggagtatataaccataacacacttcgtttcgttcattttgattaaaagattattaattttttgaaatataacttattaattcgatatgtactggaatctcttttaacttattacgttgatttttaggtgctacaaatgttgcatcgatataatcattacgatgattaagtttgaaagtagctacaaatgtatcactttctgattcaaaatttggcaagtgtgccacaacacgtttaatgtctccagttgaatgagttactgtacgtccagtaatattttcaatctctttacctaattctggaagtgtaatgtcacgtccctctaagatttgaaaatcatgttcatgcatagttatctctcccatactataaattatgtgctaaattttattattatatttttaaactttattttcaaatatatgaatattatattcaaaatgtatttaaatactattacccttcttattctatcaccaaacctgcagccttttaaaacctatattagttactctttgtagacgaactagaacttgtattattatttgattgttcactatttgagtcactactttgttcttcagtactactagaactttcatttgataaattcgtttgatttgagttatcctttttggatttttcagtttcttgtttaactgattctttggcaacagaactatctacttctttttgtaacttttctcgttgcgcattgagcttttctttttgtttctctagattatttttttcattttttaaatctttattttctttttctagctgtttaatatcattttctaaagatactttttcttcacttttaccacatgctgacaatattaaagtcgcaaatagtaaaagtacaatccacttcttcatatatttctcctttaaatatgtatcaataacacttattttaacatgaaatgtggcttgattcattttattattttaagtcttttcgcatttgtttattattggcctccactgtactttcgatagaatgagcatctttttctatcgctcattgttctaatgccaattttaaattagtagctatcctactgtttcgaaaatgagggtgtgtatataacatttcaatcgttaccactttcgtaatcgtttcaaattgatctcaagtgaaagcaaaaggttctctaaaatcatggtttaactcaataacataaataatatcttggttcatttttaatcttctctcaaacatttcttgtcttaatgctatagaaagtgttgtagcatgataatttaatgcactttttctaagtaatattcatgaatacgtgcaatattctcaattaattgataattagtcattgaaagaactctctttttatattctccctatttatacattatattctttacataactatgatatgattattcatatttaatatgtaataatcaacttttaaaatttttaaacatttttatttttaaggggataataaatgaaatcgactgcaacattagcccgtgaaaacaacgtaaaatcaatgcgtttaaataatacggatcgagaaatttttgaaaactatatgacttatattagagcagatttacgtgtaaatccacatgatagtgaactcatgctcaatcgtattttgaaggagttacttgccgcagagaaggatggaactttagctcttgaatttttcgatcatgatccaaaagcacatgctaaaaaacaacttaaatccctaccaaatgaaacaattaaaaatattgttaaatctatttttagaaattttatctttttagtgggtatattctttttctttaaagggtttatcggtttttttattcctgataatcataatgaagtatatttatatacctttcccattacgctcttcattggtttagctattatatttctctttattttagtcgtttttaaaactgttcaattacagtgttttaataattcgcattggatttggtggtttaattactgtattatcgcattactagtagtagcactgttttatgtgttttttattccacagtcatttttggcatatggacctagtattcgaattaataattgggcatttattatcatctctctaattattacacctattgctttctatatagaacatcattttgttgatgaagattcaaatactgtgttataaaaatattaaataagagcctagaacattattctcagaaaaataacaactcattgagctatatataaacaaaataattataaaaaagacccttttcctattatttcaatagaagaagtggtctctttcatttgtcgaagtatttaatgtcctagacttttattttcatacatcatcatttctattaattattgtatattcatacttgaagatgtaaacgtttgatctttagtgaacaatattaaaatcatcccaataaaaatagataaggcagaaacataaaaaacgttttctaatccgacccaatgactcattacgccccctaataagtttccacataattgtcctattaccattgcattagcaaataaagtcgaagcataaccaggaaagtcaggtaatatatcttggaaataactaatacccagtcctaataaaatcgctaaataaaatgctaaaaatacttgtcctatcatcatcatatatatattttcaaatataccaatactaaaatagaatagaccaccacttatggctcctagtataagcaaagtgcgtgtagataatttggatgctaaaatccccaatataaccataaaaggaacctctaagccggcacataaacttgctaaagtacctacataaccttctcgttctttcaaatattctgtaacgaataatggcatattcattgtatacatccactgaccaatatgtagaagtataaaagcaataaatggaataaataacgttttatcttttaacatattaggtgcagttatttcaatactagcagtatctttaacttggtcgtttatactcacatttaaatccttataaaagaatatttgtaacaatagtgtaaataataaaatgataaccgtgccgccaaatagccctgcataacccataaattgaatgaggtatgcaccaatgagtggaccaaataaaaagccaaaagagaacattgatcttaatacagtattagcaaatttcgcattatttcttgatgaagacgcattaatagattctctagcggatgcatataattggggcattgcaggtgcgaataatccttgaaatatcgcatatactataataaatagccatatatgatgtatgtaaaaatatatagaaaaactaagtgcccccataaatagtgcgcaaataataagtattttccgattaagatgatgcgtatctgaaaatctagcaacaatcgcatttacagtaaattgacttactgcagccaaagccaaaagcacaccaaactgatttgtcgacattcctagttcttttgttgcgaataaaacaaagtatggcactgtaatggcaatacccattcctaagagcatcatattaataagaaataatttatagtttttaatatgcaatagtgctgaaaacatatactatacctctattcttcttttaaattgcaatattgattaactattatttagtaaaattaagcattaaagatacaaaagcatcaacttgtggtagttgcaatatactactatcataactcatatatgttgagcggattaacggaagactatcaatattgactttttcaaattcaaatacgtgatgatcaatattcttcatcattatttctggaagaatggttacgcctacaccacttattagcatttctttacatgttgccacttgatctactgtaatagtagcatgataatcttgtccaaatttttcactataccaatgattaatttgatttatatatattggatctgcttgaaattcaataaatggtaattttgaagcatcttcatgacgttcttttggataaataaaataatgttcatcatcaaataaatggatattttttaaattcattactttattccctctagtaattaaaaggtgataatctctatgattagacctaatttgttctgttgaacccacttgaacctgtatttctacattaggaaattgtgtattatacaaactcaatacacggggcaatattgtttgtccaattaaagatgaacatcctatagatatggttccattgacttcccctatatgtgcttgtattttgtcgaaaaacattttttctcgattcaacatatcacgtgcatgttcgatgatcattgcaccttctgtagtagtaatcaattgttttttagtacgaataaatatttctactccaaacgcatgttcaattgtttttaagcgttgtgtgactgctggttgtgatatatataaaatttcagcagcttttcttaacgttttcgtttcatctaatgtaattaataattgataatcttcaattttcatagcttcccccttatgtttatccacgaatacggctatgatggtaaataaaattgatactatttcattattgttttagtactaaagaaatataattacgctttcttatgcttatttaatttacctatcatctttttataacaatgcataattcgatgatgtatctctgcaaaattgtcatcaatctcaatcatcaattgatgagcgataatataggcttcatggaattgtttcttcgtaatttgtccatttttcaaagctagttctaaatcatgttcatctactaactcatattcgccagtggatggtaaaactagcacatctaaaaataaatctaatgttctcgcgttccctttttgagtaatatttttaatgttaatatcaaaatagtactctaatggattccccttatcatcaaacattgcagtaatactatagcgttttttttccggcaaaatttgtaaccatttatagttattatctactacaactacattttgatcgaccaccgtcacctctaaaggctcacgcacctttttcatcgtgaccaagccaataatacctttaaacctattattatttaccttaacttctatgtaatcacgttcaattaggcgacgccagtgacgtttatctatgtatttaattttcacaaagccaccaactccttgtcattattatattaaactaagtaaaccatgtcatcttatggcatgttttattacttttaacatataaatttattaaattttcaatttcattttactataactattaaatttttaggtaaaattgacaaaaacactaagttttgataattttattctatattatctgaaaattctaaataaaaggagcgtttttaattatgacagttagaccttttcgagcagatcacgtgggaagtttattacgtcctaagcgtctaaaagaagcgcgatttaaatttaataataacgaattatctttagatgaattaacacgtattgaagatgaagaaatcgaacgtattattgaaaaacaaattgaaattggtttacatagcattgcagatggagaatttcgtagaagttggtggcattttgattttctagagaatattaatggcgttgaaggatatactcctgatcatggattagaattcgaaggtgtagaaacacgtgcacataatgtgagaattgtggacaaagtatcatttaatccaaatcacccacactttgaacactttaagtttttatataaaaaagtggctggtcgcgcaactgctaaagtatcaatacctagtccaaatcaattgttccatcctaatattttaaacgaaacgatttatcctaatatagaagattttgcaaatgatattgcaaaagtttatcatgagacgttacaagcattttatgacttaggagcacgctatattcaattagatgacgtatactgggctggtttaactgacggtactcaaaaagtgagaggtcgtcaacgctctgaagatgaaaaactaaaagcacgtgatttagcctataaagtgattaataaagctatcgaaggactaccaaatgatttaattctgactactcatatttgtcgtggtaactataaatcaacttgggcaatttctggaggatatgaagccatcgccccttacctatttaaagaaaatttaaatggtttctttttagagtatgatgatgaacgttcaggtgatttcgaaccgcttcgtttctttaatgacaatgcttatgcagttctaggacttatcacctctaaaacaggtgaattggaaaataaagaaacaattaaaaaaagaattaaagaagcagaacaatatgtaaatattgaccatatctgtattagtccacaatgtggttttgcttctacagaagaaggcaacgctctaactgaacaagaacaatggaacaaattagcctatgttgtagaattagctaatgaactttttggcacggctgaatagaaaatggtcagaaatgttgtcctctatctctttttaaaataaatctttttaaaaaagacacttcattaatgtagttatacttaactcgattaatgaagtgtctaattattaatactcaatgtttttcaatgcatatttttgaatcattcggcgatattgtggatatgcttctgtcaactcatcttgtgtgaataattcaaaatacttaaattcaaatgcaggttgacacatacagcctactaaactataaccttccgaatgaggtacactcgaagcaaaaatggttcctttgggaacaacatattgtagtacttctccatggtctacatttggacctaacaagacactacgatattggccatcttcagttaacatatgtatctctagtgatacaccagcatgataataccatacttcatcagcatctatacgatgaaaatgcgaaatatcatctgcttttaataagaaaagtatactactaaaagatgccctttcatctttctttacaccctccggtcgaatagtttctttataatatccaccttctggatgagattccaagtctaacgattgtatccaaaacgaagccgtgtgtttcactattttaagtccacattatggaaaacattttgaacatcttctaaatcttcaagtgcatcaataagtttttcaagtgttgcttgatcatctgctgaaagttcaatatcagtctgaggtaacatttcaaactctgcaattttaaagtcttctacacctgattgacgtagtgcctcttgtacttgtgcaaattgatcaggttctgcatacacaatcgtcaagccatcttcttcaataacgtctcttacatctacatcttgttccatcaatgtttctaggacatcatcggcagattttccttcgacaccaaacgttgcagtatggtcaaacatataagccactgaaccagatacacccatattaccaccattttttccaaatgctgctctaacatctgatgctgtacgattcacattattagttaaggcatctacaataagcatggaaccacttggaccaaatccttcataccgtagatggtcataattttcatctccaccgcctttagccttatcgatggctctatctataatatgatttggaacagaatatgtttttgctctttctagcacaagtcttaatgcttgatttgattcaggatctggctctcctgatttagctgctacataaatttctttaccaaattttgcatatattctactagtatttttatctttttgggcttttttttctttaatattattccatttacgtcccatattgtcatctcgctttcttactcaataatacttattatatagtattaataatttattgtctaaattgaaaaaaacgttacttccttataaaaaataaaatactgacaaagcatccccttgtcagtactctcccaattcatttagttaattatctaaaaatctttctacatcattaaataaagcattaaattgatcaatattagatttgttcatatagataaaaattttacgttcatcttctgttgatcgaactttacttaatttctctttttctattaatctgcgtatagaaacaagtaattttgttctacttaattctagttcttcaattgcaacttttaagaatgtttgcattaaaatttgatcgtctgctgtgtattcataagctaattttaataaagctaaatcatttaaggttagtttgtattctttctctatatattcagacaacgctttatattgtttatagattttcagcaagcgatttaattcatcgttactcaagcatttgcacctccaataaaagcgaacaattcaacatatattatcctttaattttggagttctgtcttttgcatttgttttgaattttttgttaaatttaccaacaaactcaaatattgttgtgcaaaacttttttgagatgaaatttattatttatatatctcaattatataaagcccgttataatcaagtttaatttgtaatgcctctttattaaagttgtgttctctaattttaaaagaaggatgtaataaacgatttactttcttcaagaatgttttagaccattgataacgattacgtatgtcttcagtaataatatgattaatattgccgttataatcatcaatctgttgaatttttataagatgatttttatttgtcttatgtttaaaatctacatatatatcagttttttcataattagcatttcgtgattcactttctagaacacgccaatcatatataaatagtatgaatttattttctttttcaatcactatataatgatctttaatgtattttggttcctgactaagcgtcatgatatgggccatcattgttcctaatattgttttaaaacctttttcatcaaaaagatgtaaagcattaaattgatgactatcctgtctaaaattgaaaccaataccgtcaaagtgttgagctgatttaatatttgtttctacaattaacggggcactactatttaagtcattatattcactatttaaaaacacatgattttcaacgtttaaaaatatgattctttgattttctaaatcaatgtgatttaaaatttcacgtatattttgataatgtaatatattctttactaataaacgattattaccttctattaaatagggttgatttagttttgaattatcaataaacagaaattggaaattcactcttttaatttgcgattctaaagttttaaataaaactggattatttagcaatttgctaatttctaatccaaaagaaaaccgatttgttttatgttgtatttttaatatcatacgataaatggcttttagatcaatcttttctaaatcaaaaacaatacctaattcatgatttacatttacttcaacttggtgtatttcaagataatctaatacattttcatatgtcatttcaagaaagttaattaggtttaaatcctcaagtttaaaacttatatttagattttttctaataatatattcaaatattcgctgaagttctttaacagtgaagtgttcttttatttccttcatatccactcttacataaatcattaatgatggactctcgtcaagataatcgatatatttttctaaaaataacagttttatttcttcaatcgtattgatttgtactacacattgataaggtttgataaacatatctaattttgcatcgagatatattttatgttctgttttcttctgataataatattgttgtgacagaatcatatctcttatattttgtagactatcatcaatatgagtttcataatccataaaaatcattttttcatatttattacatgatctatactcatttggtgtcattcccatataacttttgaacgttttagaataacttgaagcattactaaaccctactttttcactaattaaactaatcgtatcgtctgttttcaataataattcaaatgaatttgcaatcttcaaagtgtctacataagttttaaaactaatatttaacaactgtgtaaattgtgatgataaattagatttagatgtaaatagattagatgaaacatcttttaatgttaatttcttttcaatattttcgttaatatagtctaatacttcacttaactccccataataagcataattatattgatcattagcaatatctatttcaacactaccttgtcttccaataatttgaacaatgtcaactatgtatttgttatcttctgaaacagatttatgattaatatgattcattgttatctgtaataatgctttttttattgcattaatagatttaactaaattaattgaatatttataatcaaagaaattaaatccttcttctttaaaccaatcacttgcaatataaatcattaatgttttctcattcttattaattgaaaaaatatctttattgtttataacgtagagatcattattaatcgtcacttttttggcaaaatgttgaatttctaatgaaccttctattgggaacagcaatatgataccatcttgacaacgtgtcatttgatattcatgcttagtaagtacctgaaaatacccattagacatatactaacctctttctaatcttggtagtccttcttttaatgtgtttatataaaaatgctaatttataagtgtttaaatgtaaatctatcacaacattaatactaaatcaaaaatacgtataaaattaaattaagttttattttatattaaatatatttcataattatttaaaaaagatgctctataattgccttcttactttaataaaataaacagcttaaactactctttatttaaaatgttttgaaaacaatgtgagaacatcttttctaaatattcaacttattataaatatgaatgactagtttttaaagcggtttgctaaattcaatatatctttaatgatgtttaataaattaagaaataaattaaaccccatttctcttggcgtaaatctaccatgtttcatgcgattaaaatcaaataatgtatatagtaaaaacaagactaaactaaccattgtaataacgatatggaatattgaattatgaataaataagccaactagactagcaataataagggcaattaacgttacaaataaatatttacctaagctagaagcatcatgaataacaaaataccccaatattccaaatacaatgaatgctataatggctaacaatatatttttataaaaaacctctgctcctaaattttgcatatacattgaaaatgttgcatacgataataaaccaataataatagcatagatatgcgaaataataagaccatatttacgtgctcttttaataaataacgtcactaatacaatgacaaataatgtaattgataaaggacgtcgccattctactggcaaatattgacctaaataacagccaattccaaaaataagccaataatatgtaaaaaatagccaaactttacgatatgcatgattttgttgagtattatcttttgaacgtacattctgatgttgatgatttactaaatttgaagaacttgacatcttatactcctcttttaaatagtgtcttacaaatattgtacaatatttgttgggaatacaaaaatagtataatttatttacttttaagtaagcatcctatcaagaaaatataaaaattattacaagtctaaatcattaaaaacaattcaacctacttgttacatgatacgtacttgcttcaattttactataagaaatattacaaatttctttttaaaaaaatttaattttatctaaatacaactgttaaagactactgtatcaaggtttttatctatttacaaaaaatagtattacttttaataatattacaagataataacaacccacatattcttatatttttttgatagtatatgcatgtgatataaaaagatgaattatacaaatttaacaatattaaattctaaaaataaattttaaaattcaaggaggatacgtagtttgaaaaagttagcttttacgttgtctattgcgtcaggcgctgtagcatttttctctcatcatgctgaagcatcaacacaatatactgttcaacctggagattccttatggagtattgcaaacaaatacaatacgcctgttgatgagcttaaacgaaataatcacttaaatggtaatttaatttttccaggacaagtactaactattaatggatcatctactactacatcaagtagtttatcaagtaaggcttctactacttatactgttcaatctggtgattcactttctcgtatcgctaataaatatggaacttcagttactgacttaatgaatgcaaataatttttcaaattatttaatttaccctggtcaagtattaaaaattccaagtagttcgagtactacaaactcatcgtctactactgcttctcaaagcactggttattcttcaccaacttttaaccatcaaaatttatacactgctggtcaatgtacgtggtatgtatttaatcgtcgcgctcaagctggatcacccattagtacatattggtctgatgctaagtattggacttataatgctgcttcagatggttatattgttaatcatacccctactgttggatcaattatgcaatcgactgctgggtattatggccatgtagcatatgtggagcgtgtgaatccagatggtagtattctaatttcagaaatgaattatacatatgggccttataatacaaatactcgtgtgattcctgcttcattagtttctagctataactatattcattaatatgattcaaaccacaaaataagcttgagacatgtttatgtctcaagcttattttgtggttaatttaccttaaagaaaaatatttaaaatccaaaatataattgctgctaaaatagcagaaattggcaacgtaataatccatgtaataatcatacgttgagctgtattccactttacaccttttgcacgatttgatgcacctacacctaaaattgatgacgatacaacgtgtgttgtagataatgggaagtgtaatgatgaagcaacgaaaatcgttaatgctgaagataaatcagtagctgctccattagcaggtcgtattttcattatatttccgcctactgttttaataattttccaaccaccaattgcagttcctagacccattgctgtggcacaagcaattttaacccataatgccggttccacattcgttggatcttgtaaattcgctacaatcaaggcaagagtaataatacccattgatttttgagcatcatttgtaccatgtgaaaacgattgaagcgctgcagtaaacatttggaaaaagcggaaattacgatttgctctcgtaagattcgcatttttaaaaacaattttaacaattgtatacatgataaaaccaacacaaaatgcgataattggtgaaataattaatacaatgataatcttagtaaaaccttgataatgtaatactgtaaatccctgtgcagctattgcagctccagcaatagcaccgattaaggcatgcgatgaagaacttggtataccatataaccaagtaaccaaattccaaacaatagcagcgataatagccgctaatactactactagaccattttgtaatttaaatggatctacgatatctttagtaattgttccagctacccctgtaaaagtaagtgcacctataaagttcataactgcagctagaaaaatagctgttcttggtgtcaatgcacgcgtagaaaccgcagtagcaattgcatttgctgtatcatgaaagccattgataaagtcaaagattagagaaaatacaacgatagctatagtgatgactaatacatattccataatttaaaactcccttagctatttttcatgataattgtttcaaagttgttagcaacagcttgacatttatcagcgatattttctaagctttcgtaaatatctttaattttaattaaagtgattggatctgtttcactattaaagatatgtttaattgattgtcttaatataccatcacaatttgtttcaaactctttaatattaattgaatgaattctcatgtgagataattttttatcaacaagtaaaccaactgctaatttcatttcagcgacagctttttgaatattgtcaacaaattcagccatatattcatcagtatattcaattgaatacatttcaaacattccagatgtttcttccattgcatcaagtacatcatcgattgcattacacaatgatagaatgtcttctcgttcaataggagtgataaatgtttgatttaagtcgctaatgaccttgtgcataagttcgtcaccatgtgactcgtacgttttaatgttatcagaataagcttttaaatctaaatgggtattaaaatccattttcccgaattctacagctgcacggtccagattaaataccatttcttctaattgaaccataaacttatcctttttcttagtgaacattataatgcctccattttagcgattgctatcaatcacacgtttattatttaatttaagacaatttaaaaatgagctacatttacaatagcttattttaaaacattatttagaaagcttttgtaaagtttatgtaaatataatgttataccaattacgatacacttctacttaacacctaatttgtctctaattgaaaatatcataattttttcatctctacaataaatttacaaattctttacaaactcgaaatattctctcttaaattgagtgattgatcgttcgcttagaatgattataagcaataaatgcaaacatactatatactattgtataaataatcataactataaaaatggacatttgatttgtaaatcctataaatttcataaatacaagtgctgcaaaatatgcatgaagtaaagcaatagccaaaggtagtccaaagttaaacgccactttcaattttagacctctagccatgtctttttgagtaaaacctaatttacgtaatattgaataattttctaattcatcttcagtttcatcaatttgtttaatatagataatacatccagttgctataagaaatgcaatacctaaaaaagaacttacaaataataaaattcctgttaaacttgaaatttcgcttgctatctgacttctagtttttaaattctgattcatgtgattgatagtcttttctaatttaggtatatcttttgtatgttttaaatcaaaaccatgttgagaaatgatgtccttatttttaacatgttgttttataaattgataatccccgttattaagcacgagtgtcggtccacctaaatctatactctctttaaaataaactttatgaatcactttttgaagttgaactttagtatgatgtcgcttcgtaccaatcattgctgttccgtgtggccgatgtttagttaattcaggaataacatcttttgggataattaaatctgtttgtccttttttcaaagaaatatttgaaaagtaatcttcacttgttatagtcaccgaataaggtctagctgcatttacatcaaatagatgatctttatataaatgcgtgtacactacttgcttataattatagttatatgcaatatgctgttgctctaattgatattttaacttttcggacaaggtgtcgttgttcgttgttacttcatacggtgattctaataaaatttctttacttaaagatcctcgactaattgctgcaaaacataggacagatacagtaatagcagaaataatagaaatgattgttaaagagaaagcattctttctaatcctaaacattaatgaagaagtgaaaataacatcatttacagttacatttccacttttaaatgatttaattatttttaatattagagacactgaacttctgaaaaagaaataggctccgatcacagttaaaaataaaataataaaaggtaatacgatatcatctaataattcaacaaatcgtgtggataaataatatcctgccaaaatgaaaacaatacctaaaattcctagaataatttctccaaatgtaatatgtttacctgtttcatctatatattcttcagactccattaattgtgtaacagaatatttatttaagaaaatgatagcttgaagaataattaaaatatatgcaatgattaaaataaataaggtttgaattatagcgtctacactaaaaataagcgataccgaagtatgtatacctaataatttcaatataatcataagtaaaattttagacccaacaatccctataatcatacctaaaactgcagtgatcaagaaaataaacaattgttctaacataaacatataaataatacttactttatttaaccccataatctgtaatagtcccaattcgtaacttcgtcttttaataaaaagaatattggtatacataataaagacaacgatgattataaatagaaaataacttcctattttagaaccctctctaataatagataaagactcatgtatatggagatgatgaacatatttaatcgtaataaaactaaaatataaaacagtactaatgactaatgaaaacatataaatagcatagtgcttaatatttcttaggaaatttctccaaataatatagctaaaactcataaaccttgccacctaatatactttgggctcttaatatttcttcataaaataattgtttattatcttgtccttgataaatttcagtaaatattaagccatctttcaacattacaacacgattagaaaaacttgctgcaagtggatcgtgtgtaaccatgataatagttacatcatagattttatttattttttcaaaacgtatgagtaaatctctagtgttcttagagtctaaagcccctgttggttcatccgcaaaaataattttaggatatgtaataaatgcacgcgctgcagatgttcgttgacgttgtccccctgagatttcagacggatatttatcactaatatcatatatattaagcgcttcagtaatttgtctataacgtttattcatttcttccttatttaatttaagtactgataaaggcaacataatattttcttttacagtaagtgtgtgtaataaattatattcttgaaaaataaatccaatatctttttttctaatttctgataattccctatttgataacttttccaattgttttccatttagtatgacagatccttgtgataaataatctattgaacttaaaacattaagtaatgttgttttaccagagccagaaggtcccataattgaaacaaactctcctgtttcaatgtttaaatcaatacctcttaacacttcttgtatcgtttgttttgtcccatatgttttaacaatttgctttgcttgtaatattgtcaatttagaatgtccctcactatcatatattttaactattgaatgatatagatgaacctgagacgtcattataaagtctcaggcttcacccaatgttctactcacttatgacactaaaatgatatttccatacgcttaatttatgtatttactttaaatattatataagttttagttcaaactttttatagtaaagtccaatatcttatttctataaagcgaacaattatacttatactctattttaacaacactattatgatagacttaatttctcttgtgacattctttctatgacttcgttttgaatagggaacgttaaaataaatgttgttccttctcccaccgtcgactcgacctctacttcaatacctaatggatgtcttacactttctactaagtataaaccaattccagaagaagttgtttcattacgatttgcggtagaagtatagcctctttcaaagatacgtggtaaatctttagcgctaatcccacgtccataatcagtaatttctaaagcgatatggtcttttttagctaacgatcgaataacaatatcttttccttgagaatatttcaaagaattagataaaatctgtctaatcatcatgcgacaccattttacatctgtaaatacttctggattcgtatcaaattctaattcatagccaatacctttaacttgactgatatgacgagtaagttgaatttcttctatcactaaacgttttaatggtactttttcgaaatacatatctctatttttagattcaagacgtgttaaataaagttgcttatctaataattcattcactcttgaccattcataaagtaaggctttcttacgttccatatcttcagcttgatcaattaataatttcattgctgtaacaggtgttttaatatcgtgaacaaattcagttaacgattgttccgacgcttgtatatgaatttgttgttcagtagctctttctttgtgaaacaataatttacgatataaatagtccaccatttcttgttgaaatggattctcagctaattctttgtgtttaatttcttcgatttccttattattataaaaatgttgatataattttacttctcttaaaaaagtaaaaacaagaaatatacaagttaaacctatatttaataggacaatgtatgatacactttcaattgccatatcatagtctatatatgccatccctaaaaatacaaactgtaaaaatataatccaaaatatccaattacttcgtgttttaagaaatagccaaaaccatttcacattactcatgtgccatatatcctttacctacttttgtttcaatttctgtttccataccgatctcagataatttttttcgtaatcgatttacattgactgttaatgtgttatcactaacaaacgcttcgtcatcccataacgctgtaattaatgtatctctagtcacaatttgattttgtttttgaattaacatttctaaaataatcatttcagttttagataaataaatgattttatcgcctttttgaatactatcttttgaaagatcgactagcgcatcttgccaatttaatgtacgtctttcttctacgccaaattgatatacgcgtcgataaattgcttgtaacttcgcaattagtacgttggtatgaaaaggcttttgcatataatcatctgcacctaattccatactcatcacttgatccataggattatcacgtgacgataaaaataaaataggcacattagacacttgtctaatttgacgacaccaatagaatccgtcatatttaggtaattgcacatccattataacgatttctggctgaacattatgatatgtttccattacgttactaaaatcattgacaccataaacaaaaaaatcccaattttctaattctttctttagttgttgaaaaagcgtctgatcatcttctactaataatatttgcatatgttttcatcctatcactttgtatatttcattttttctcctgattgcacacgtccattgaaatgcctaatacgacaatcaatttcaaaccctctcataattaaactttgtacgggagcttgaaaaaaataatagagtggccataacaatttaggaatataatcatatagttgaacaattactaaacgcgttcctttaatttgacgaaattccaatttcccttgttttttagaacgtttttttataattgaaccgcctactaaattaaatgtaattaaacgattatcatttacttcttttttcattactaatagaggcttacattcgttacgagcatatattatatatcgattttctatatatttcgtgtgtaaaaatgtaccacgtgtatcattcagccatttaaaaaaataagcgactaattgttctaaagaccatttcctaggtaatatcattcttaatgctgaccgtatatcattatacttagacgcttgtaactcaacattaatatgagagcgcttgatataggtctcagtcgtttcaacaggaacaccatagttttttaaacactgtattgtctcactatcaaagcgattacctcttacgtacaaaattttatttattccttgttgtgctgctgcccttgcaaaattatcggctgcaatgagatttaaatcacgtgcagttgcttgagtaagcttggcagaatttttattaggatctaaataaaatactgcaatattcatacctgacattgctgatttaacatcttcataattataaatatctttttttagccatgttatattacgattaacctctttttttgtatttggatatttagataaagcaaacaaatttgcatcattttctatcgcactgctaatattcttacctatataaccactaccacccgctaacaatacattaggtttcattattctgttactcctttttaaaattctaaatatgtatattttttaaataattggtataatatatgttatattactatctcaggaggaagccgaatggctcatattattcgtgaaattagtataaaagatactgaagctttgacaacattattagctaaaatatatgatgaatctgactatacactttataatcctggagaatttaaccctagtgtgtcttctattagtaaccttctagagcgtatcatcacttctccgagaaataccatctatgtagctgaagaagatgaccaactcgttggatatatattcgtcactactgaaaaatacgaacgtacacaacatgaagcagttattacacttggcgttactaaattgtatcaaaaaaaaggtattggacttgctttaattaatgctgttgaagcttgggctcttaaccataatattaaacgtcttcaagcttcagttgttcctgaaaatacacacgcaatcatgctacttaaaggcgctggatttaatattgaaggcgaacttaaaaataagttactgatcaacaatcaatattttaataaatatattatggctaaattactactttaattacaatatgtattatacgctacgttcaaaatgcaaaaaagcaattcgtgttaattacacgaattgctttagactgtctatgagttatttaactttgtagacagttttttttatggattatttattttatcaattttaagcaatgtggtctttattatcacttttacgtaaatagtatttaataagcactgctaccacaataaataatccaactacgcccataatgttatataagaagttgattaagtctgcaaaaccaacgaaacttaaaataaaggctgcaatcatcataatgataataaatatatgatattttttactgtatggctcagtgaaacgtgcagcaaacgaataagtcaatcctaaaatagtattatacattactgctagcataatcactgttaaaactaatccaagccatggatgaatttcattcgccaattttaaagttggaatttgttcatttttaatttgtggatattctgattgtagtgcaaagttaatcagtgcaagtaaaacagtatacactacaccgccaaataaagcaccggcaccagatacttgacgtttagatgcatctccaccaatcgccacaaccgtactaaatcctacagcaaaagctaatccaccgtacattaaccctctaataatacctaagaataaacttggatgatctactgtactattaactttactgatagagatacttccagcaaatagataatatatagcaataagaactaccatgacaatcaagaatggtgtaacaacacctaacgctcttacaatcttattaaagtctaatagtagtgttaaataaataacgactgtcataattaacgcgccaagccatgtaggtataccaaagctttcttcgaacgttgcgcctgaacctgcaatcattgttacagcaattccaaataagaaaaagactagaatataatcaaagattttactaaatttttcaccaaataaatattgtaatgttgattcatgatttgttgcttcaaaagccgttccaattttagcgacttgtcgccctataaatcctaaaattaatcctgatattaacacgccaatatatgaccatagaccataaggcgtgaagaattgcattacttcttgccctgtagagaatcctgcgcctactacaatccccacataagcaaaacctatttttatagattctttattcaatcccatgtattgattaacctccttatttttgacacattcaaaattataacgtactaataataatatgcaacagtgcataaacgttgcgagacaacgcttatcgcttctaagtactagcattaatactcttacaaacaatttaaaaattttaatatttataataatttgtcacaaaaattatatttgagttactaagtaaaacattattaaaaaaagttagataaactgaataaccatggctattcattatctaactctcttatttcactatattattttattttgaacttccaaatttctttaattcatcaaaattgactataacattatccatgtgtttagctgaatcttttaacacatttcttgctacatgattattaggatctaattttaaaatttgtttagctactttaaacgcttcagaatctgaaataattgggtcgggtatagcatataataatagcatttgaagcaaactttttatttccttaccatttgttaactgaatagaagcatctgcatgataatatgccgcttctaaagcgccttctacttcactcaaaggatagactaataataaaaatgctaaatcatgtaattctgctgtttcattatccttcatcatatctaatatacaagtataaaacataatgttttcttgttcatgagcacatgatatatatacttcttcgaattccataaaatcaatattggacattatatttttaatttcttcaaatttgccgttcagaacgtaaaatttaatatcttcttgtagcgtaatgtccacctactttcatcatcaatatcatgctatttattttatcatattcattttggataatcattttataaccttttttttatataaaaaaacatcaaaattcatcattacttatttaaacgctgtagacttaaatgacgatcgattcacttcttgaatcgcttcattagcagttttaccaacacttaaagacattgctgctgtaaagcttccttctacaatgggtgcatttactttgtaaatatgatacttacctttatacatatcaattgctaaatcaatattcatttctgatgatcctaaatcataaaaacataatgcatcatcatctaactgattaatcaattgtttaatctcatcatacgaagttccaatttcaccgtttactccaccataggcaatgacatttatgtcatttgtcattttatttaataaatctttagttcccttagctatatcttcactatgactaataataactatagttgtcatcatttcaactccagtcaatcaattaaataacgaaattaattttttattaaagtgaatcttaatcagcgtattttcattataaaataacttatctgaaagcgcgaatgtttgtgtatcagacaaaatattagtcattgacttcctatatattaaaaatgactgagataggtatccaacatcataataattgtagctgtgttgctgaagttataatggatctcaccttttttcaagtaaattgtaagtgactaaaagtggtttccctgttctaggatcttttcctaatactgcatctatattaaacacactttctaatatctctttagatatgacttggtcagtaggtccattatctataatttgtccttctttcatgattaacaaataatccgaaaatcgaattgcctgattgatatcatgtaagaccataacgatcgtacaccctacttctttattcaactgttgcaccaattgtaaaatttctaactgatgagaaatgtctaagtacgttgtaggttcatcaagaaaaataatatctgttttttgtgctaaagccattgctatccatacacgttgtctttgtcctccacttaaatcattaatcgattgatgacgaaattctgtaatgccggttacgtttaatgaccattcaatttcatctttatcttttttagataatcgtccaaatcctttttgatgaggaaaacgtccatatgaaacaagttcttcaacggttatactgtcagtcactgttggagtttgaggtaaaatggcaatttttttggctacttcttttgtagattgatgttgaatgttttgattatcaagtaatacttctccatttttcacttcaatcagtcttgagagtgcttttaataatgtagatttcccacaaccgttcggtccaataattgatgtgattttaccatcatgtatttgaacatctaattcttttataattgtcgtatttctatatcctatatctacttgagaggcatttaaacgattcatatataagccctacctttgtacaaaaaatatttacgacatctattgataatcgttctcaattaattattactagtataccatttatacacagttttgactattctttttactatgaggcgattataaaaaataaccctaaaaatctgagatatacataaaacacctcaaatttttagggacccttttttattcatcgattaaaaaaccatttccataaacatcacgcacgtcatgaataaccaagaaagcattcttatctattttttttataattcgtttggcacgagttacttgagttttagctacaacaacatacaaaacgtctttttcttctctactataataaccatgtccattcaatatagtaagacctctaccaacttgttcatcaatggccttagctacctcttcaggtttgctagaaataattgtcattgctttttttgtattaagtccttcaataacataatccattactttcgtgcctatataaagtgaaatcacagttaccaatgctttacttaacggtagcactgttaaagaaatggctactacaattaaatcaaaaaataataatgcgtatgctgtactaacatctaagtatttattagctattcttgctaatattgttgttccagctgtagtgccacctgctaaaacgattattccaatacctagtccaacacttgtgccgccaaatactgcattgatgatgacattacctgtttctacgtgccatgattctgtaagacttaaaaaaacagaaataagtacagtagcaataattgttaatatcgtactttttttacttaaaaatttatacccaataacaatcaatattgcattagcaacgaagttagtgagcgctggtgaaatatgaaaagcgtaatataatacaatagcaatacctgtgacgccaccttcacctaaattacctgatataacaaatgcattgacccctgctgaaaagataaaggaacctagtataactaaaagtatatttttgttcaaaaacacccactccttttacgactataacgattaaaatgttagcacagtctcatcatttcctacaatatacttttaaaaattaaatgtattaataaatgttaaatatcttaaaatataaagatttaatttaaatatgatacataatcatctttaaatctaatgtactaataaaaaatacgtgtgaattttctgaatttttcgtttacttataaatattagtttgctatactatgtataacttcttaattacaagaagttatctcctttgtgttgtttatagtaacaaaacaaattttgctcgaagtactgtgacagtacctagtccttaccgttacaagtacattaatattcatttcccataaaaaccaagtatataaagtgtctcctcactttgcatgcttggtttttatcatgcaataaaatgaataataaaaataggagtgacatagaattcttttcgaattcaatgttcactcctaatggttactataaaatgatttaatttttaataccttaccatgcaaataaaccaacaaatgctgcagtaagtagtgaaactaaaatacctgataataacatcatcggtacatattttgaaacaaaatctgatgttttcttatcaactataccctttaatgtaccaacaatcatcccaattgtagagaagttggcaaatgaaactaagaatgttgatatcactgcgcgacgatgtgcactatatgtatcaattacttttgtaatttcacccataactacaaattcgtttgtgacgatttttttggacatctgttgtgccactatccatgcctcgccccatggtaagccaagcaataaagcaaatggatacataaagacacctaagatttggtttaaaccaaagctacctttcagacccatccaactgcctactaatccagtaatcaaattaataaaacgatctaaaaaatcagccaacgctacaaaactaataacaaaagcgataataattaatactaatttacccgcatttaatactgaatctcctaaaaatgagaagaaaggttgacgttcaattttttcatcattattaatgctatagataatatcttctttttcttcaacagtgacaggatttaaaatagaagccacaataattgcattaataatatttaaaggaatcgccgttaacactaattcaccaggaatcatttgaacataggcacctacaatagctccagaaatagaactcattgacatcattgcaactgttaatacacgcatttcattcatacgcttaagttgttcgttagagactgcaagcgcctctgtatttcctaaaaacatcatttcgataccaaagaatgattcaaatttaggttgacgtgtgattttcgcaagtacaaaaccaattcctccaataattttaggaagaatattaaaatacataagaatatcaaatagtggaacaactaataaaattggaaataatgcactcactgccatatccatttgtttaccacttgtaaaactactgaatgcaaaacctgttccagtatgagctgattgaataatccaagcaatggcagctgctaaaccttcaacaattgatcttccaatttggaaatatacaaagaaccatgctaagaatacatttaaaagagctaagattaatatagatttccattgaatatgtttgcgattcctagaaaataaaactgctattcctaaaaatacaagtaatccaatgatatttattagtaaaaacataagacacctacccacattttaaaattaatatgtatcacattacccttaaatagaaccgtactattttcataaaatgacaactaacgttctgtaaaaagtacatttaacattataccatgagaaaatgttcgttaaaataacatatttaataaaatagttgtctatttctttttttgttatttatcataaacaccatttaaacttaatacggttatatagaaaaagaatgggaaaacgaatttaaagtaactatttcccattctttatattatttgattttatgattcattttcatgaatatcattattaatatagtctgctataaattgagaagattgacctttttcaattgaacaaaaatcattatagaacgcttcaattttatctttatatttttctttatgtgtatctaaatgttttaattcttcagcaagtttaaattcatctgtaataatttctcctggtaaatcttccatataattcatatagaagccacgaagacctttatcgtatttttcaatatcataagcaaagaaaaattgaggacgtttcaaaataccataatcaaacatcactgacgaatagtcagtaataagcgcatcagatattaaatataattctgaaatatcattataatttgaaacatcaatagcaaaatcatcgtatccagttagatctaatgcatttgcaataagataatgcattcttagtaaaatgacatagtcatctccaatttgctcttttaaattagctaaatttattttcaaatcaaataaatattgaccttttttaacgaattcatcatctctccaagttggcgcatacataataacttttttatctttcggtaaatttaaatcttttttaatttgttctatatactcagtatcattttgtcttgtaactaatacatcatttcttggatagccaatttcccaaattctttcttcatccatccaaaaagcagatttaaagatatccgtggaataacgatttggagatactaaataattccaacgagatgcttctgtgtaaaaattctttttataatttgctgttgttgttcctggcattcttaccactttcatatcatttgctaaacgttttaacggtgtgccatgccaagtttgaatatacacttgattctcttttttatttaaatacaatggtaatcgagcatttgaaatccagtattttgctttagcataggcttcataatattctttggatccttttttcactttagttgcatttccaggaataatattgttattaggcttagaaaagacccaaatataattatattgtggatagtgttgttgcatatattcatatatgtactttggactatcactgtaatttttgccaccaaatgactcaaatacaatcgtatgtggatctactatattttcattatctgtaagttgatatttagcacgttctttcatcttactgtttgtaagaatacttttaaataaacgtgtttttttacgtaattcattcacatatcttgcattctcaatgtcatccatagataaaaacatgatttctagattatataacaacttaccatctttaatgatattccattttagtgcttttactactttaactagagtgtcctctaaagcaatatatcttgctttaatatctctaagcgaaggatcaaacccttttttaatttcatttttcattctttggactaaaaatttcttaacttctttatttgtagttctttgcatagcatcaaagaaactatttgtatagtcttcaaatttatcaataaaatcttgatcacttagtgtattaccattaaatggatcatatacttcaccacgataataaaacggaaaattaacaattctaacaaagtgttcagcatatttcagatactctaatacaaatgaattatcagtaaaaatgcttaaatcttcattaaatttaatatcatgtgctttaataattgcatttctaaataaaatattacatacagtttcttttcttaaaattgaattaggatatgaatggtgtgatcgatactgcaaacgtatcttatccttgtctacatattgaggacgttgcattgtaaatttgtgtatcggcgcaattaatgtatctaaaccattgatatgatttaaataatattcaatagcatatgaggctaattgatcatccgcatctaaaaacatcacgtattgaccttctgctgagtccaaagcaatatttctagcatgtgcatgaccagtatttttttcaagttgaataaacgtcacatctttatcataagatgctaacgttttatttaagatttgtgttgaataatccgtagaaccatcatctacaataataatctcaaaatcttgattcctttgattttttaagctattaatacaatcttcaatatattcttcactattaaaatatgtaataattattgatagtttattcaatatcattctctccaattttatttatgtttattcaattaatttttaagcaatgggtttgtgtactaactatatcttatcagcctaagattttttcatctacactgtaaaattatatattactttatcatcgtgatatttagatgttcaatatccattatttatttaaattttgtgtagtcacaaattgatgatatttctcatgatatttcattaattcgtcatgtgtaccttctcccgtcacacgtccttgatcaataaaaataatttgacctgcttttttaatcgtagagagacggtgtgcaatcactatcgttgttctacctttcatcaatacttctaaagcttcttgaattttttgttcactttcactatcaagatttgcagtagcttcatcaagtaacagtatatctggatttttcacaaaacttctagcgatatcaatacgttgtcgttgacccccagacagttttaatccacgttcgcccactaatgtatcgtatccttcatcaaattgcataataaagtcatgacaattcgctaattttgcatatttaattagttcttcatcagagacagtacggttaataccatataagatattatctcgaattgttcctgtcatcatagagtttgactgcatgacatatccaattttgctacgccaattcgtaattggaatatcgtaaatactttcattaccatatgtaatatcaccattatcgatatcatacatacgttcaattaaattaaaaatagtgcttttcccagaacctgaaggaccaacaaacgcactaatatcgccctgaggtatacgaaatgatacatgatcaagaatcgtttttacatcatatttaaattctacgttattaaattcaagtgctccattctcaatgttgatattagcaatggggtttaactgttccatcggttccacgggttcttgcataatttcataaatacgttgacttgcgcctacagcttttttgtaatcagtaactagtgtagataagttcataagcggcatagataactgcatcacataaaaaatcatagctattaaagcacctgctgtaatagcaccagtagcaattctaattgcaccaaatcctaaaataatggctatcattaataacataatcacacttgaaataggttgaataatcgctactatttttgcctgtcttaaacctaatttatatatttcatttaagttataatgtgcattatttaattctttttgttcagtattagaaatttttactaaacgcatttctgtcaatacacgacctaataatccactaaaattggcaatttctgcttgggtatgttttgaaattttttgcatacgtcttccaagtggaatcataatacccataaatattggaatagctatgaaagtcagtaaagtcatttgccagtccataataaacagcataataatggaaccaatcaatgtgataatagctggtagtaattgtggtaatttttgagagataaaatcgttaatgaccttagtatcatcagttaaacgactcatcaactgaccactttcatttttgtcaaaaaatggcattttcagtttaatcatatgctcccacaataatgaacgaatgccataaatcattttttctccaattttacttaagagataaatacctaaaccgctaagtaatgcattaatgataaagatacttgcaaatagaacgacaatattccaattaatattattagtagaaaatttatctactaagcgacctgtaaacagtggaatcaataatccgctaagacttcctaacgaagaaatgataacagcagttattattaaaccatagggccaagacaatcgtttaaatagaaaaaataatggattgtgttgtttcataaataaacctctttagtcatcaatttgtatttgtatttttgatattatatttagtgtttatcctaatttaaatgtattttaactggtaattcggttgttcttagtatagcattttatttaaaatgttttatcacataaaaataggagtgccctagaattcgttttgaattcactgttcactcccaaaaggatgggtcaaatcaaaaaattattgttatctacttgatttaaccaatgattgagacatagctaaacttctaaggtgtctatatgtgtctttaataaattattatttattttgcatcttttccgtatagctcttgtttaattttagttgttgaaataccctcagtgcgttttagatatacaacttcacatttgtcttttaggaagtcaaatttaccttcccagtcatggcccataacaaaaacatcaacatcataacgatcaacgtctgtttctttttgaccccatccatcttctggaatcactaaatcaacgtaacgaatagattctaacatcattttacgttgttcaaaatcataataagattttttatttttaatttggttaaattcatctgttgataaagctacaattaaataatcgcccatttcacgagctcttcttagtaattctatatgaccataatgtaataaatcatatgtaccatatgtaatgactcttctcatatttcctttctcctttacaaatttttaacattaattaataatcttaatttagcataaatatatttaacataccattaattttatattgacatgacttttcatcatttacttattcatcatacgtttcaatgattgctttccactaaatactaattttttaggcattacttgtgctttaaaacgtaaaaaaccaggtcgcccaattcctacctcaataagtgtatgtctccataattcataggtctcacgtgtccaatgagtcgcactttgctctacggcttgtactattctaaacaatgcttctccagaataatttgtacgttgcatatctctgatatattgagtgattttgtctataatttgaagtgtcactttactgtattttattaaataagcttgaatgagatagctgacaattaagtcatccattcgataactataatatgctttttctttgacaagtaataacatatccatgacttcacgtcgaacttttctagcatcttctaagtaagatataaatgtatctgcacgttgatctgtaatagaaccttctcgctcattgtatccatatacgataaaaggaactagctggatatcccttgacattaaataggcacgagtgacaaatgtatgttcttcacaaaatactacatcttcatcaaatcttagtatattaaatttagctttgaataacttgccacctggtccaatagattgaagtatttctggcgcttctgctaaagaaaccattgcttcacgatgaatgtcttcgtgtgttggaatgactttccagtcaccatgcatccctctaccgatttgcccaatcacaatatctagatgattatttttctcataatattgaatcatttgatccatttttccaggtaaaaattgatcatctgcatctaagaacataaaagcatcgatatcatctgacattgcagaaagacccatatttctactttttgccgctccttgattgtcttgatgataaacaatgagatgtttaacttctttttgcaattcagttaacacttgttttgtacgatctgttgatccatcgttaatacaaataatttctacatcatgtgttgtatcaatcgatttaactgcttttcgaattgtattttcagcattatatactggaataataaccgctaatttcattctttcaccaacttttcaataaattttaatacgttttctaagcttttttcactattatatttatgccaatgtttaaataatggttttatttctttttcattatatttaatcttagttactaattcatctatatgtttcactttataaaatgttggaatatcgcgataaaattgattcaatccacgcacctcttcatactctttttcgtcaaacacataaaataatgtaggtttattgagtaagctagcttctattggtagggagctataatcactaataataatatcagccatcatcattagttctgacgttgtcgcaatatgctcactattaggaattgatggatgaagttgattaatgagagtataattgggtaattgcttttcaaaatatactttatctatttgacgattatccatttgattttcacgataagtaggcacatataatgctaatttattgggaacattataatatttttttaaatttttttgctccgtcttaaggtctaatttaaaatatttggttaatcgaggtagacccaatttaagcatttgagtgctcttagcatcaaatgcactttcaaaacatctactcatctcttctccaccgactaaataataatcagtagcattataaacgcttttatattgttgaatcatttttttattatttaaatctacttgatgatccgttaaaccaaaattttttaaagcacctgaggcatgccatgtttggatgatggtctgtccttttttcttatgataccctccgagcataagataatatgtatcaatcacaatcacttttgctgtacttatcgtcttgatatgtctcactatatgactatttccggcaggaacaaaagatacatttttaaattgctttagcttagcccattctttttctttagcaatgacggttagttcataccctttctgatttaattgctcaattattggcataacgtcttcgggaaatgtcattaaaatcgcaatatgattcgattttagtcgtttaaatctaaaaatttggtttacgatagtaataagtgtcatataaatattttttatcactactcttgtcatcatttaatccccttactcgttaataaaataatttataaagaaagagtaggacagaaatacattgattttgtctctactccttatcattttcacatacatctctatcgacatcgtctatattttatatttatttatgatatatatgctaaagagcttgaaatgcaatctaatacatttcaggctctctactaataaatgtaagtattgatttatctagcacacgttttataaaaaatctgcaaaatgatctcgatatctacgatgtaatatagaccctaatacaaagaatactataataatcacaatattataaagaagtaatctccaatgttcaataaagtaccattgatggaataaaattgctgcgcgataagactcagctaaaaagtatacagggttaaatttcataatgtcattaattacgctactaattccagtatcttttggtatccataaaataggagacatatagaataaaattcttagtaatgcttgcataatcatctgtgtatcacgaacaatgattccaagtgttgatgtaaaaagtgctacagaagccacaaagaaaaatgttagtggtacgtaaattaacaattgtacaatatggatagacggcataatgccatttcccatacaaattgcaataataagtgctaataagccaatatggccataaaatttacttgttacgatataagttggaataattgataaagggaaattcattttcgctacttggttaaatttcatagatactgatttcgtaccttcaagaataccttggttaacaaagaaccacatgctaattcctactagtaaccataaaataaatggaatgccatgtatcggttgattactacgaattcccataccaaagacaaaccaatacaccataatttgaagtgctgggttaagtaattcccaagccatacctaagtaattatttgtatttgttattttaatttgaaattgtgcaagtcgttgcactaaataaaagttttttatatgttctttaaaaacagttcctactgccgacattgaattaaaccacactttcaattgtaaattcataatggcttttaatttctttaactactgattaaaatcgttttattataaaatttctaaatcaacgtttaaaatgattcatataaatccattatatatttacgcaacacattagtcgaaaattttattaggatagacttaactcagaaaagaaagtaaaattaatatattgtttacaaaaaagatacaaaatctcatatacactttacactaggttaataaatttaacaactattgagtgatgtattataatctatataataaatcataagaaaggaaaaatcatgagcgtatctgttaacataaatcatgtgacaaaagaatatcgaatatatcgcaataacaaagaacgtatcaaagatgcgttaattcctaaaaataaaaacaaaaccttctttgctttaaatgatgtgtctattactgcttatgaaggtgatgtgattggtttagtaggtataaatggttcaggaaaatccacgttaagcaatatgattggtggttcattatctccaagttctggaaatatagatcgtcatggtgaagtaagtgtcatcgccattaatgccggtttaaatgggaaactgacgggcattgaaaatattgaatttaaaatgctttgtatggggtttaaaaagaaagaaattaaaagacttatgcctcaagttattgaatttagtgagcttggcgaattcatttatcaacctgttaaaaactattcaagcggtatgcgtgcgaaactcggtttctctatcaatgtaactattaatcctgacattttagttatcgatgaagcactatctgttggcgatcaaacatttactcaaaaatgtttagataaaatatatgagtttaaagaagcaaataaaacgattttctttgtaagtcataatatcagacaagtgcgtgaattctgtactaaaatcgcttggattgaaggtggaaagctaaaagaatttggtgaattagatacagtgttacctaaatacgagcaatttttaaaagattttaagaaaaaatctaaaaaagatcaaaaagcatttagacaacaacttgatgaaaaacgttttgttgtaaagtaaaagaggtagagacttaagtgattcataggcttaagtctcatcctcttttattttttcttcttattctgcaatttccaaactttaaacataaatttaggaatactttttatacgacctattcgcttccaatcaataagtaatcggtagacccattccatatttaaatttctaaaaagacgaggcgctctttttttagtaccactaaacacttctaatgagccacctacgcccatcattactgtatgcttaaaattactttcatttttttgaatccattcttcttgttttggaacacccattccaacaaataaatagtcaggattgaaacgttgaattcttttcactacagtttcatctgacaggtcaatatacccatgatgatactcaaaagtaacattaggatatttctgttgtaatttgtgttgtgcttgcgcaacaatttcattttttgatcctaacaaatataccttttgactttgctcgtgtgcaactttaatacattcttccataagttcaatacctggtacacgtcgctttaatggttgttttaatctattagaagctttaactacacctgtaccatccgcaatgatataacttgcaccatttataagctttcgataggttacatgttcagaagcatacactacgatttcaggattagcagttacaataaacaagttatcatttgtattattttcaaaaaaatgtttaatattttcaatcatatccaacattgtcacattatcgaattgtacgcctaatatatctactttatcgttttttttcttttttgaactatacatttacgttaactccctgctttcttaccctctttatatgttgtaatgaatttataataacatcaacttattcatcatatattatttttgtcattgtattcaaaaatacgtctaaagtctaaaggaccagtttatcttaatgatttataatagaagtcatactattaacgtgaggttgattatggattatttgcaacaatttttaactacgactgttatcttaaatatttatttagtcattattatagcaatatcttatatcattattcatcaaaatcgacattgttcttttaatcaatatttagatatttatctaaattatattccagtactgactcatgaaatgggtcatattctatttaataagttaagtggggggcatgctaaagatcttgtcattgttgtacgccctagtgaacgtaaagaaacgttacaacaaggctatgcaataacacaatctaaatcagttactggacaatgtattacgacattaggtggatatgtcatgccaccaatcatgttaatgataggtttttggaccattcattttaactatccaagcttatttttaatcttatatagtttgatatttatgtattaccttattttaacatctcgaaagttgtctcccattatcgttttaatcattttaatttcattattgtattttttattgcaaggcaataatcaatttatgattttttatatcgtagtcctcctatgccatcttatcttaggtgtcctattaggagaagttttgcaatctagttggacaattatattattgactttccaaagagtaaaaacacattgggatggtaatactttagctgaattgacacatttaccaacattattttatagtctattttggattatgattaacggtttctctttatatttaatatacaaatttatgatttaaaaacggctcatcatattcaaattgaatagacgaccgtttgtttaatttttctctacaaatatattctttgcattatcataacttagaatcgtcatagttgtatcattatttataatcatgactttgttggttttatctttggatactatttcaatgttatctccaattgaaatatgcttactggatagataaacaagtaaatccgttctatcgcgaacacgtttaatgtttactatgtctccttcatcatattcaagtaatgagtcattatacttttctttataaatataatttcttggaataactcctccatgcggacaagtttcaggataatttaacagtttatctatcctttctaaaaataagtcagaaattttatgctctaaaatttccgcttcttgatgtacttcttcccaattataatttaatacttcaattaaaaattgttctaataaacgatgtctttttataatatcgagtgtatgagagagaccttctttagagagttttacccctttataatgtttagtttcaacaaatccagctttttctaaacgacttaccatttcacttacagaaggtggttttatatctaaatattgagatagtattttatttgaaacgaaagcgctatcaccaccattagttagaattgctttgagataatcctctttttcttcagttaacatgatttcacctcataaacagtttcatcttattgtatcacgaatggttgtgtaatgtgattgtcttctattatcttacaataagaggaatacatcttaaatttcaatgttaaaccttttatttatacttaaaaaaacctaagacatagcgagttgtcttaggtttagtattaatcattattgaattattaaattagtcagttaaactgtctacaataaccatttcatcatagttaattgcctcacgtaattttaaagctgtcgcttctgtaatctcttcatcactaataagttcagttaaaatacgacgttgctcttttaaagcattcaacttaattttagtaattgaatcttcagaacgtgtgttaaagaagttagatggtgataagttgtctattctcattaaatatccatcacatatcatacccacttctaatttattgtcttcatttgcctcctccacaagtcggcttacaacattataatggactcttttattgattttagaaagttccattaagttttcagtaacacttaatgatgaagctgcatttgtacgtgtacgaatatgacgtttcaaaagtaatcctctaattccaacaataatacgacgaatgagtgaagcttgtctataaacttgtgtacgttcagcaaaacgcatatagttttctagcatgctttccgtaatttcgccttcatctgctaatttttcaagtgtttttgtttctacgttaaaagcaatgcgttgtaaacgttcaagctcttttgaattctcgtcatctttttctactgattttaggaaagttaatttatcatgatattctttaataacatttccatatcgatagcttgtttcaaaggaggaatgtttgtttaaataatcaatcacgtgttctaaaatataaattcttgcttctttaaaattcatacttcctattttaggttgaggtgcatttttcgtaacaaaaggtaaaatgatttgtgcaatgaccaagcttaagataaccattcctgaagaaataaaaagtaaatcattacgatacttaaaagcttcatgattttgtaaatagtaaggtaacgttaatgcgatggcgagtgaaattgttccatgaacaccacaaaatgtcataattaacgcatacatacttcgtttaggtggtttctctttcgtatttgtaccctcatcattcattaatttttggaatggactgactgatagataaaataaaggatatagtacataaacccaaataaatctaaatacatatacagccaatgctactaataaagtaattcctattaagaaaagtaagttatgtggttcacttttaataatttttacaatgacttccggcactaagaaaccaagtatcgagaatacaaaaccatttagtgcatagcctaaaatattccacgtatggttataacttagttgaaggcgtgtacgtgtttgagcaatacggtcacgttcaaaaccatgaacaagtccggctactacagcagcaataatacctgaagcatggaataattctgccacaagataggttacaaatggtgttaacaattgaagaaatacaaacatattaatattttcaataccacgtcgtgttaacgttagacggaatcgaacaagtaatataccgatgaacaatcctacaatggcccctcctattgaagcaattaagaattgttgaatcgcttcaaataacgagaaagcgccagtaacaagtatccctactgctattttaaatgaaatgatacctgcagcatcatttaataaagactcaccttctaaaatcgtcattgcaccttttggtaatactttaccttgagtaatagcttgcactgccggagcatcggtaggacagagaattgcggcaatcgcaaacgctgcaccaattggtaaatctggccatactaagtgaataaataaccctacacctatgacagtagtaattactaaacctaatgccattaacatgacaggtttaatatatcttcgtaaatgtaccctagatacattaacaccttcaacaaataataaaggtgcaatggtcgctagcataaagagttcagaatcaaaattgaattcaactggtacaggcaatataaagaggatcattcctaatatgatttgaataaatgcaagaggtactttaggaataaaagtatgaacaaaggagcttacaataacaacagctagaaatatgagaatcgtttcaaatatttccaaactttcaccccattatttcatatttaatttgagatataagatacattgtcatcttatttattttaaacgtatatagttattatctaccgtttttatgctctcaattcaatatcaattttatcattaaactatattcagattaactaacttgcactttcaaaataattcatttaaaaattattaagatatacaattattcttctaaatcttcaatatttttatcacctagttgttttctttcttcagctctatggtttttaatatcataatacagtttttctcgttgttcttctctttttttagcacgactttttaactcctctcttgtattaaattcttttgaacttaataaaatggaagattgtcttggtgcatcatcttttctatacatgtatgctccagttcgataagctgctctagcaacaaggtgcataccaacagcagacgttaaattaataaagacaatggataataataaacgaacactaaagaaaccttgcaccgttgtaaagtatattaataccccgattaaagtaagtaatacagaaagcgttgaacttttcgtggaagcatgactacgtaaaaaaacatcttgaaattttacaatgcctattgcactaatcactgcaataatacttcctagaaaaataaggatagacgcaatcaactcagtgacgctttttatgagttccattgaatacccgacctcctccaataaatctagaaatagatacagagcttacaaatgaaataatcgcaattaacataattgaatctaaatacgcatcagtaccataaatcacgctaaccaccccaacaatgcacataattacagcactcgctgcatcaaatgctacgactctgtctgctgttgtaggacctttaatcaaacgaaacaatccaataataaatgcaataccaaataatattaaagctcctgtactaaaaaagttagtcatcgcttggatcatcgtgacacctccataattaaacgttcatattgtttaatactttttaacaaattagctttttcattttcagaaatgtctatactatgaataaaaaatttattggttaattttgaaattctaatcactgtcgatccaggcgtaataataattaaaatggttaaaaatgtaatggcccaatcactttttaactctgtttcatatgtgagaagaccaggattcatatcttttgttttaaataaaatatatttaatgatactaagacttgaagtaattaactgatacaaatatatggctaaaaacttaatagctacccatatttttactaaataaaattcttgaccaaagaatcgatgaagtatataaatgataattaatcctataagatagccagatacaaaggtagagaataaaaaagaaccttgatcttgaaagagtacccatagaaaagcaattaagatattcaatacaatttgtctcatttattctcctcctttaaatgtggattaactaagtgatggaagtaagcatcatttgtatttaactctgttgcatttttagtaacattcataacaattggtgccgcaagacccataactagtacaactacagttagtatgccaatcatgcattttcgatgcacaggcaatgggttgtaattaacttgctcgccatctgcatctccaaagtacataataaatagtattctaaatagactatacattgctaaaagacttgttaaaatcatgagtgctaatccaatgtaattaccattttgaaccgccccttggaaaataagcactttaccagggaacccactaaatggaggaactccgccaatcgcgaaaatcataacaataaatgctacgccaaagaaaggctctctctttgccaaaccatataaatacttatattctctataaccagacatataaactaaactaccaataataaagaataataatgtctttactacaatatcatttgttagataaaaaatagcaccatgaattccagcaaatgtatttgatcctaagcctaaaataataaaaccaattgataaaataacttgatatgctgcaattttctttatgtctttaaatgaaatgactccaaaagcaccaataatcatcgtaatacaagacataaatacaagtatggggtgtgtaatatttggatgttgatcaaataataaagtaaagaagcgaattaaagcatatgctcccactttcgtcattaaagctgcaaataaagctgcgagctcagtatttaatactgcataagctttaggtaaccacataaataaaactaacgatgcttttgagccaaatgcaatcataaatacaattgcaatgaccactaccatttcattattgtgaatatcatctaagcgtaatgcaacttgagaaaagtttaatgtccctactaatttgtaaagtaagccaatacctaataaaaataaccaagaaccaataatatttaaaacaacatagacaatggctgctcttaattgttctattgattgtcctaatgttacaagcacaaatgatgcaagcaacataatttcgaacatcacatagaggttaaataaatcagaagttaaaaaagcaccaatcacaccggtagttaaaaataaaataaatgttggtaaataatagcgattcacacgttcttcagcaggtccaaatccatacgccataattaaagtcactacaaaagaagcgactgttaccatgagtaaacttaaagtatcacctaaaaattgaataccaaaaggtgctttccaaccaccaaaatctaaagtgattggtttatgattcatcacataaatcaataaagctagcgaaataagcgtattaaccgtcattgttccaatatataaaatcttcgaaactctatttttattcttcgtaaatacaagtaataatgcacaaagaagtggtaagagaatcggaaggattaataagttactgttcatcatcttcatcctccctaagcacatcaatttctgattcttttgtaacacgatatgttcgataaactaatacaagtaagaaagctgtcataccaaatccaataacaattgcagttaaaacaagtgcttgcaataatggatcgacatagttggtatttgaaccacgaataagcggttctgttacgtggtcactataatgacccatactcataataatcaaattaccagcatgcgtataaatcgaaatccctacaataatacgaattaaatttaaagataatatcatgtatgtcgctaagaatacgagaaatcctatgataagtaataaaataagattcatgatttacccccactcaatgccaacataattgtgacaatcacacccactactgaaagtactatgcctaattcgaaaatcctcactgtagtaatatgcatttcattaaatattggtaaatgaagtgtaaattcactttgatataaaaatggtttgccaaaaaaggtaggcacaattgctgtgattaaagaaataagtgctccaataatcattaattttctaaagtcgataggtaaactgtccaatactttttttacatcgaaagctaaaaacatcaagataaaagctgagctaaagacaagaccaccaataaatcctcctcctggattattatgacccgctaaataaatgtaaaaaccaaaagtaagtaaaatgaatacaacaattttagttactgtttttaagactacgtcattttctttcatcttgacccctccgatctttgtaatttaataatgtataaatacctaaaccagcaataattaataccaagccttcaaacatagtatcaagtgctctaaaatcacctaaaatggcatttacaatatttttaccacctgtgagttcttttgcattcatataatatttagaaattgtttctaaaccatcaccttgttgtgccataaacacaagggttaccactgcgcctgcaaaaatgaatgctacaacaattttcataatttcttttttcttatctgctttcttacgtgaaatattgggtaagcgtgaaaaactaacaatgaataatattgtagtcatcgtctctactacaagttgtgttaaagctaaatcaggtgctctcatgattaaataaaataatgcaactgaatagccaataattccatttaatattaccatcgttaagcgttgtcttataaagacaagtgctataccaacaacactgattgaaatagcaagcagtacttctaaagatccaaagtcagtaacatgcattagatgtagtttcggaaaccctactcttaaaaagccatacgctacaaatagtgaaaacactaaaagcgtaatcacattgtagtaatttaatcggttcgtcattacgccacgaatactacaggcagcataatgttcaaatacactataagctttacgatagaaatttgtaatagatgctgttttgattgagcgatgcgttaacactttccaatttacttttgttgctaaaataattcctaaaataataacaatgatactaaaaataagcggtaaattaatgccatgccactgggatacatgtggtgccatcttatcgacttggatacctaagtttgtgacatttcttaatgcaggtaaaacaatgggatgcgtaaaggtatttgggataaagaagataacaggtagcatcacagcaaagatcattgctggtaaactgaacaaccatggctcatgaatatgctttttaggaacttctttttcattaaattctccccaatatgtttcttttagcatgtaaactgcatagacaaacgtgaatatacttgcaatcacgcctaatgccacaattatgatggttaaagttaaactaaattgctctaattcaatagatttaactaaagaatcaaaaaacatttctttacttaaaaaaccatttaaaaatggtacgcctgccattgataatgcagcaagcgtcatactcacatgcattttaggaaagaattttctcatgccatttaattttctaatatctcttgtgcccgcttcatgatcaataatacctacgcccataaataacgtacatttaaataatgcatgattcatgacatggaacaagcctgcaaataaaattaatgtgtaaattttagccattggtccgcttggatgctgcgcaatacctccacctaaaccgaccattgtcataatcatcccaagttgactaactgtagaataggcaagaattcctttcaaatcgtattgtcttaaagctgtaagagatccaaacatcattgtgattaatcctacaaaagtaacaatataaatataactattacttaagcctaatacaggtgtgaatctaaaaagtaaaaatatacctgctttaaccattgttgctgaatgtagataggcacttacaggggttggggcagccatagctttaggtaaccaaatatgaaatggaaattgagctgattttgtgaaagctccaataagcatcataatgatcattggaataaataaaggatgctcgctaatatgatgaccttgcgataaaatttcagtaattgtattcgtacctgtcattatgtacaacataataaaacctgttaataatgctaagccaccaaataccgtaatcataaacgactgtattgcacctagctgactatttgcattactataccaatacgaaataagtaagaaagatgaaacacttgtgagttcccagaagatatacataaggatggtattattagatattactatacctaacatactaaacataaataaaagtaagtatatgaaaaatctaggtaagttatcaccattaggtgttaaatattgggtagcgtaaaagaaaacagctatccctataatagaaataattaaagcaaacattaatccaagtccatctagtcttaaatctaaattcaaatcaatggctggcatccaagctattttaaaagaaatcactttctgatgaagtacattaggaatttgagataagaagtaaacagaagcaatcactggagcgaatagggaaatataacctgcatagcgtcttagaggcctaataaataaagtgattagaaccatacctatgattagtaaaagtgcccctagtaaataaactaaactcatcaaagccctcctttttataaatttaaagcaataattgtatgatgattttctttaggtgacaaaccaataaatttcaaagtttcatgcgtagtctggtgtcctaaatatttttgaataatcgcaatagaaacacccgatttataagcatgatatgcaaaagttttacgtagagtagttaaaccaatatgtaaaaggcctaattctttagctgcgtggtgaataattcgataagcttgctgacgtgaaagttctttatgtgtacgaagagactgaaataaaagatgatgatctttcaactgattttcacagatatatgtatcaaattcatttcttaaatcagaaggtatcataattttgataaatggagcgccttgttgaatccaagctgtctttatttctttattttccttattctttatatcttcaactttaagatgtaataagtcagtaagtcgcatacctgtatgtatcgccagtttaaataaaagataatctctgtctgatttcatttgtaacacgtgatacatcttcttaatatcattctttttcttaataggttctacataattcatttatccacctcaaaaaagtttcttatttaatgatatatcatattttagtaacattgaaatatttcgctcaactttttttgatttcaagttactttttttaaaaatattttcgatatataaaatgtaaggaggtgaaagtaagatgaacgaaattactcagttatctgttatttgtactcacgttacacatgatacaaatggaaaagctaaagaaattaaacgtcgatttaataacattaatacacgtgcttctgaagcagacatcaaatcatttgtaacaacaatttcaaatttgattgaagaatctttcgataaagttgaagttgtaaaaacccaaggattagtttaatgaatgattttattaaaaaggaggtatgaacaatgtcaaaaactttagaactcatatttaagacaactctaaacaaaacagctaagttacaattaccacaaatttcagcaacaataacagaagcaaatgtacaatcagcaatggaaaatatcattaagttagatgttttaagatttaccagtggcgctccaagcaaagtcgcttcagctcagattgtagataaaacaacaacagttttatttgaattaaattaattgatatagtagacgtatgttacaatatcaaattttacttcacgtcttctaaacagtagattgagaatggataaagcgttctaaaagagttttatccgttctcttttttttagtatagaatttttttataaatttacgtataataatcgtatttgatagtaaaaataatggaggaattacgtttgctttttttatttatacttggaattattgctggtatgatggttcctattcaaacatcgattaattctagattaggtcgatttacagagtcatctttttatgcctctacgatttctttttttgtaggaactctatttttattattacttaatatcatttttaatatccaaatgttctcaagctcattttatgctggtcactctattgattatcattggtgggttggtggcttgcttggtgtatgtttcttaacaggtaacttattacttcttccaagattaggtgcagcacttacggttgtgatgacagttgctggtcaaattataatgggtgttattattgatacattggggttacttggggccaatcaaacatcttttactttttttaaaggtgtggggattctcgttttattgttcggaattcttcttatgaaccatctacctaaaaataaacttaaagataaaagaaatatctcactttatatttggttgttaattggctttattttcggatttgcgcctccgctacaaactacaatcaatagcgggctttcaaagcaaatggattcttctttattcgcttcactagtttcttttactattggaactattgcgttatttattctaacaataatatttaatagaagtctaaaaattaaactatcacaacagcatctcggtcatattaaaccgctctattttattggtggaattttaggcgttgtattcgttacatctaatattatattaatgccttatttaggtgctgctcttacaactattgttgcaatgcttggccaaatgataatgggcgtcattattgatcactttggcattggtgtacctaaaaatgaaatgactttccgtaaatttataggattaatcgctatagcaattggtattgttttactacgtttattttaatggctactaaaattaaacttttatctaaatcttcgtcttcttaatgcaataattgagaagacttttttgatgtcatcatttcgttatgttgtatttagctctaaacttgtataataaatgcatattaatgtttagaggtgattatatttgaaaaagtttttattccccttatcaataatgttaaccctcctccttctccttattatttcgtttggattttatatttattctaaaattcctaaaacgactcatttgagcaaaatagaaacgatgactgtaaaacctcattactctctttcttttcaaggcgttcagcaagctaaacaaagttatacactttattatgagccctcattaggcattagttcagatattctagtaaaaaataatgaggttatatctaaagatacacccatatttaaatattataatccgcacatcgaaaaacatattcttgcaaaaaagaaacttttatcttcaatacaacactcaaataaaatatcctccgataacttcaaccaacaagttcaattatctaatgatatactcaatttacaacaacaacttcaaacacgcatttatgctcctattaaaggtcgagtcactgtacttcagcctttcccttcaaaatctcatactgaaattatgcaaattaataatgatgaacgaatcattcgtgctaaaatcaaggaatctcaacttaaacaacttaaaaataatcaacttgttcaagtttctattaaaaacactaggcaatttgaagggaaaattttatctatttcttctattccttataaaactgagacctcttcctctttttattatgtagatatttctacagatccttcctaccctattggataccattttgatcttcacttaggaacaacagaatatgaattacccgataaagtcatttacaataaaaattatgttctagttatacataataaaaaaattataaaaagaaacattaaatatattaaaagtaaaaaaagtgggtatattatggtatccaatggattaaatattggagataaaattattacgcatccttctacatctttattagaaagcaccgaataatcttttgttttagcatattaaactttaattttataatatggagcatcataataattgttcttaattaaatcttttataaaatttgcttatttttataaacaaagtattaattaatcaaaacattgttttattaagtacattttcgtttactttctaattttatttagttataattaactaaataaaatagaattaaattaaattaatttatttaatctaaattattaatagcttttttaaactaatagatgacgttatatatagataaatttaacggatgcataaaaaatagagagaatattagttggggaggtcttaaaatggctatttcaaaaatcaatgactgctttgaattattagcaatgattacttatgcagataaattaaaaagcattattaaaaaagaattttcgattagctttgaagaatttgctgttttaacttatattagtcaaagtaaagaagaagaatattatttaaaagatattattaatcacttaaactacaagcaacctcaagtagtaaaagcagtgaaaaatttatctcaagaagattacttcgataaaaaacgtaatgagcatgatgaaagaacagtattgattcttgtaaatgcaacgcaacgtacaaaaattgatgagctacttaatagagttaacaaacgaattgaagaagctaacaaagaaacagaattataatagtaaaccataaagagactagaactttaaaaacctagaataatagcccgtagataacatttgtctacgggcctcttttatagccataattcatattatataatattgttttctgtagaataacttcattctaatatttataaacactttttaatcattctttatatctagaataccgctctttagattgttctgtttttttagatattcgattgtagataattttgactctatgcttacaattttatatcaatagatttgtagtattagatgcatcatttttttctacaaaatttaaatataatgttaaaaatttctcttcttcttctatatgaggtgcatgccctgattcattaaataaaacataatttatatttttaaattgattttcaaattgttgattctctttattggtaataattgggtcataacgtccttctactatcatagttggaacattgatttcatgtgtgactgtatttgattgattctctgtatctaataaggctcttgatgctactgcactatcttcatcatcttgtttactatataaacgttgacgttgaaaccacttcattgcaacatcatttttcttataaatatatggaaataatataagtaacgcttcagatttattaaaccccgctactttatcttggtgctcaatcattaactttgtaaaaccatgaacaatatcttcagatttagaagatataattgttaaagatcgcactttatctttatatttttcggtaaaagcttgtgcaataattccacccatatcatgtcctaataaatgtgcgcttttaatacctaattgctgcattaacatagttaaatctttaatgtgatcatttaagttataactcataggatgtgtagattttccatggcctctcacatcgtaaacaatgactctatagtgttttttcaattctttttttaatgagtaaaacccagctaaattaccatctaaaccatgaattaaaataacgggaatgcctgtacctgcatcttgataagctatctttatttgattagacgtttcaatttttttcatatcggcacctcccttagtatttactatacccactaaaacatatttaacgctataaacatgtatacaattaattatttttttatttaaaaatttttatataatttaaataaaaaactcaaccctattcatcatggttgagttaaaatcagatattttattaaatacttcttctagatgataatcgtatagtatatgtaacaattaatacgacgataataatccaaatgataagtgaaacagtttgagcgacatttgaatttacaataacagcatcaatcgtcttttgagagaataataaacctactgctgtatattctaatcttttaaaaataaccccgcataaactcattataagtcccataaagaaaataaattgatgactatacatagtaataggaacaatgcctatagtgagattaaatgcacgcataataataagaattaaggcaataattgcaatcatatagcctatgattatctctgtgcgattactatataaatattttttccgagcaatttgtatatgaataaaaatagtaatcgggaaaataacaatacaataaaacaaagataatatggttgcagcttggaatggaacgtattgcttatcatataaatatgaaattaaaataaaattgataataaaaaatataataggattcaattgtaaaccaaataaattccgttgaataattaagataatttgagccgttgcttttcccctaaaatcaagataatcttgcttttttgcttcagattttttaaagtcgttacgtatattttctttaatgtcatcgataagtttagggggcatgcctttatgagtaaaataatcattcacattttcaagtaataatttatcgtttgatcgcatatgttgctcctttatcgaatgcaagttttaaaatacattcaattcattcatttcaacattttatcatagatttcaattgatttcttttcgtaaaaaagaagtaggataacgaattccagatggaattcgttatcctacttctatatatttcattatcttttaaatgaaatcgatgatacgtaactttaactaactacttcattacattatttattaatgtcaatacgatatagttttaatactttgtctttaggtgagcttgaaccaaattgatagcttgttttaccgttttgaatataagcaaaattgccacttaaactattatattgaacgcgtttaatggcttttttacctacactttgtgctactttttgataagttggaccattggcttgattataagtcattgatactctagttacataaccagtattttttttaccgattgcagtaacaactaatacacctttgtttgtatggaattcatagtatttttcttgattatttggattatatgaataaataggtgtgccatagtgattaataacatttttaattgattcacctatagtcacattttctaatgttttttgaccttgagttaattgttgtacagtctgaatcgaattaccactagctgcttcagcatgattatagcctactcctgtcattactagtccagaaactaatagggctgttgctaactttttcataagcactcgctcctttttcttttatgcttaattacagtataccctatttatgaccaaaataacagaaacattacaaaaacattacaaaatatttcatttttataatgcattaatattggtaaacaatactatttagtgttgaggcatatgtttttttataaaaggtgtcacatcatggataaacttctcttgttcttcttcaaaaggatacatgcttgacttcgaatacacttcgaaatgtacatttcctattaaatctgctacttctttagattcaagagatgttattctttctccataagcacttgcaactataaatgtgggtttagtgatgtactcaaatacttctgcaattcctctttgtttaaatacttcatctactgcttctgtctcttctttagtagaaattgaattagtatcttcgacattttttaagaacttattcactttacgatgtttataatagcgatgtttatctaaaaacttctcttgtttatcttcattccagttacggattttatgtgcgtattttctaaacaatcgttcttctggtaactctccttcaatagatgtcggattgatcattgttaacgaagatacatactctggatattgctttgataaatgcgcaataattgtagcacccatttcatgaccaataaaagccgcttgatctatgtagagataatctaataataaaataatatcatctgcaaattcattgaatttaatatgtcgtggtttatctgaatatccatgaccacgtaaatctaataatacgacttgaaatgtttttgaaagtgcatgagctaaattttgaaaaattgaagcattttcaaacgcagtatgtacaagcactactgggtatccttgtcccattgtattgtaatttaatgtaaatccaccttttcttgtaaataattccatttaattatctccttttttttgtttatttatggataaaatcgttaagagctcttctattgttgtaatgatataatctacttcttcttctaaaggttctaattcagcattttcttgtttataccaaacacttaccattcccatagcacgtgcaggagcaacatcatttaaggcatcatctccaacatacataatttcttctggtaagacgtcaagttgatcaatcatatcttcaaaaatacgtgggtgaggttttcgataacctactgtttcagaagttgataaataattaatcacgtgttctattcctaatgaataaatccgaaattgtttgatctttgatttcccgtttgcaattacacctagtaaataatcatgctctgacaacttttcaagtgtgtataatgtatcgtagtatggaaatacatatcgatagaaatgcatttcgaaatcatgaaataaatctttccatttcaatctatcgatgtgaaattgttttattatctctttatatacataaggtttatcgttatcttcatcatcatctaattctataaatttatgtttaaagtcagcaagttgtacatgtacaaaataatcatgaaaacgttcatattgttcttctataaatttatctcgagacttagttctatccaataatgttccttctaaatcgaacacaactgctttgatttggcttaagtccatttttatttacctcttatcaatataattattcttattttaataatttttgttcacttcactaacgtgttgtattagattgagtgactaaaatataaaataatatgggtatcccaacaagtgataaaataatacttgctggaatttgcactggattgataaccatcttccctataacatcagcgaatagcatcgttaatgcacctatcaatatgtttaatgtcatttgtatagcaagactatattgaaaataatatcgtctaattaattgaggtacaatgatgccaataaaacctatcacacctataaacgctactgctatagctgtcataatagatgttaacaaaagtacaataaatgttatccattgcacatttaaccctagagacttacttttagcttctcctaattgcaagagcttaatgggtgtaactaaactatatatcacaataatgattggcaaagaaaccattgtaatataaacgagctcattcatttcggcattcgcaaatcctccgaaataataggctaacatacgattcgtacgttctggtttaatgagtgtaagtatatatattaatgcattaaaaaaagcgcctaccataagtccagatatgatgagtactctaattggaaaatttctagacaatacgattgtcattataacaacaagtaaaagtgtcgtgatactaaaaatgatagaaaaaattggaataaatagaaaagatacgcctaaaaatatagctaaacttgatccaaaagtcgctccactcgctaaaccaagtgtaaagctatctgctaaaggattatttaataccgtttgaaataattgacccgtcaacgttaatatagctcctaccataagcgcctcaaatgttctaggaactctaactttaaaaaaaatcatttgattaaatgcttgatgtaatgaccctaaatcccaaaaaagacttatagccattatgatacataagaaaagtatccaaactgaaaatgttaaatatagatgttgtttcatttccactcacatttcaattattatttatttcctatattacaatgaatatatccttacgactaataaaaataagattacaaaatgattctttctctgttttgctcaatttacaagactctatgttgtataaaaagcctacaacattgtcaatatcgttgtaggcttttgaaaagtctctcatcttaacgttttaacgtttataaattgcatcacgtaattctttcataccctcatctatacgaggtcctggtcgtgaaatttcgtcaccattgactgtttccacacgttcattttttactgcgttgacttcagagaaaccatcacgttctttaatcacttcataatattctttttttgaaatcccttcagttgaaattaaaatatcaggattttttttaataatactttctttatctactgctttccatccactaacatttgaaaatacattttttgtatctagtttttctatcatatcattgaaaaaagtttcttttcctgctgtatatatttcaggttttgaagacacttctataaaaacactctgttttttatgatgtgctggaattgattcaattacttcttgaacattatcttttgtttctttgactaactgtttcgcctctttttcacgatgcgtcactttacctacttgctcaaatgaatcgtagacttgattcaaagactgagcatctttaatatatactaccttcacaccactatcagctaaactatcaagtgtttttttagcagatgatttttgagattcatgagctaaaatcaaatcaggtttagcttttaagagtgcttctttatttaagttcattgcatcaaattgttgcttgcctttttttacgttttttggataatcatcaactgttgatacacctataatattttttccaagaccaagtctatataatatttcggtattacttggaatcaaagatacaatacgatgatatgtatgggtattattattgtgatccgttgtttcttgctcagttgaatgcgtagaatgatgtcctttttcgctcgattggttttgtccacacgctgctaaaactaatgctaatgtaaataaaataatccacagcttcttattgttcatttataaaccataccttcctttcacaattttgtttatttcatatatttatcataccaaattatttatatcattaatttaattctataaatttttattgtgtaattttatattattgattaaacttaatgatttaattctattttaaaataaaaaagtaaggaaacagatttcaaaataaattctgtatccttacttttttcatactatacagtagctattttaggatttgggccatacttatttgtcccctcatcactatcttttagtgtaaatgcaaaagtgatcacaagaataataagtaagactaaagacatagctgccaccataattcctaattcaagcgcaatcattccgttgaaaacaccatcaactgaaataccgtatgttcgatctacaatacttgaaatttttctaattaatgtaaatattaaaataataagaggcagaaccattgtgtgccctgaatcatgtaaacgacgcaccgtcatcgtaaacgttcctataaacataatgatatcaatgatttcatacacaatatcaaaaaatgtatgccctccatttaaccccaaagtaatgatattaaaaagtaaactaatgatcactaaaataatacaattagctaaaatagcaaaccaataatgacgtcttctagttcgactttttacattaaaataattttgccaaaataatttgaatgcttctatcatgtttaagctccttttatttatcaaatatattatacatatatcatcacatattatagaacttaaaaacatcttttattaaatatcatttcgaatcgcatcagcaatatactgatttaaattatcgtgtcgtttgttattaattgttttagcaaatcgctcatcattctcataaatcgaggcaatatattctaaaaattgttcatctacattaggtacttgtgttcgaagaatatcttttagttcaaaaattgcttgtttaacctgtatatgatttattttatagtttgcaatgaataattcattcattttatcaaagaatgaatgtaacctctccattgttctcttattattttgttgtttttctgtagaattcaattgtttttgattctctttaaaagcttgataataaggagtatgactatatttcatttcagcttctttctcatattgatgttgtatattatcattattccatttactcatattaatctcctcttttctatgattaacgagatgatgattaagaaaatgaatcattttgtttaattgatctctttgtgcaacaatacactgataattattttctaatattatatttttctcttctatactgttactaaaataaagttgaatatctgctaatgataaattcagttctcttagaaattgaatggtctgtaatttagagatatccttagaagaataatagcgataaccattagatgcaatataagttggcacaagcaactcaatttcatggtaataatgaagtgtgcgtttagttacttcggtaatatgactcacgtcattgggtgtaaagtatacctgattttccattctgacatcctgcctttttcttaatctatttgattcacttctcttttcatctctctataaaagagactaagctatgacgtcacgttaaggtcaatccatatttgtaaaatatggatctaagaaatgatatctttgttcaatggagccattaaaataatttttcccaaaattatctagtaaagcatgaaattcatttgcatcttgatttgtaaagtttgaaggtaattcaacatgtctttttaatttatcgtaattctcagtattagcataaccgagttttctatataaccgacgtgtataatgatcaggaataaattcaaccctctcaaaaatgtagactagcaatacatctgctgtttcacttccaataccatgtagtttaagtaattcatttcttaaatgttctccatatacttcattaattttgcaataatcaaactgatattgatttaaccagttgaataatgtagaaattgcttttgctttattgttatagaaaccactagagcggattaatatttttagttcttctatcggcagatctaatatgttttgaggttcaaaatgggttgcttctttcagccgtctaagagaaagtgcagcattattccagtttgtattttgaactaatatagcacctaatataatctcttcacgtgtatctgctggccaccatccttgaggacccatatgttttaataatgctttgtaaagttgttctgtagtcatcattgacatctttttacctttctataaaaaataaacaccttcacaaataaatattcgtaaaggtgcttttaatttaaaagtatttatattacattgattctggtgctgatacacccactaatgctaatgcattatgtaatgtaattttaacagcttcaataagagcaacatgtgcttttgttttttcaatatcatcagataataccttttcagcattatagaatttatggaatgctgaagctaggtcttgaatataattagttaatcgatgtggtgcacgactttcagcagcactctcaattgtaggctcaaactctgctactttcttcaataaatcaatcgctttttcatttgtaatggtactaaaatcagcgtttttgtctatttcaatccctttttctttagcttgttttaaaattgaacaaatacgtgcatgtgcatattgtgcataataaattggattatcttgagattgctcttttgcaagttccaaatcaaaatcaaagtgcgaatcaggactacgcattgttaagaaatagcgcgccgcatcaatgcctacttcatccataatttcacgtaacgtaattgcattacctgtacgtttactcattttaacttcttcgccattttgcattaaacgaaccatttgcataatttgaatttctaaacgattgctatctacaccaaatgtttctaaacttgcttttaaacgattaatataaccatgatgatctgcacccattaaatcgattaaaatatcattgccacgattaattttattgtagtgatacgctgtatcaggtgtaaagtacgtatagttaccatcttttttgattagtactctatctttatcatccttaaagtctgacgtacgtaaccaagtggcaccatctgcttcatacgtatagcctaactcatgcattttttctaatgtattatcaatcgcaccattttcgtatagtgatgtttcactaaaccaattatcaaaatgaacattgaaatctgataaatcttttttcaatttatccatttcataatcaacacccagttgtctaaatgtttttaagcgttcttcatcagagtaatctttcatttccggatgttttttggctaactctttaccaatttcgacaatgtctttaccattatagccatctgttggcatttcatggcttgtatcccctaatgcctcaaagaaacgtgtttcaattgaacgtgctaaatttgtaatttgattaccagcatcattaatataatattcacgtgttacatcgtaaccagctgcaattaaaatatttgctagtgaatcacctacagcagcatttcgagcatgtccaatatgtaagtcaccagttggatttgctgatacatattctaataatatttttttgttttttggttcttccgcataaccaaatttatcccctttttgaattgcttctgagatgacagctgttaaatattgattatctaaatagaagttgataaatcctggaccagcgatatctacttgttttacgtttgctttacttgtatctaaattgtctacaatagcttgagcaatatcgcgtggattacgtttagcaattttagttaagaccattgcaatattagtagaatagtctccatttttagtatctttagggatttcaactttaatttcaggaatatcttctgctagatttgcttttttaatacttgcttcaatttcttgtattaaagttttctttactttttcaataatattcattcgcctatctccttatacttaagttcatattgatatgagcccattttttcgtcattttgatgtaattcgtattgtatttttaattttccaccattttcatttacaaaatgtaaaatactcttagttcttactattaatggaatgcgtcctgctggtatagtgtaaagtgttgtagtgtccttaccttcaacgaagtgtaagttcatattgatatcacctttacgtatcaacttcacgccattgtcttcaattttaattgttacactaacaactgcactttcaatttgttcttgatatcgaatataatcggcatgtttttgttgccatgacccttgagaagaaaattcaaatgtttgtttttctccattttgttttaagacttgtttcgtttgaatgtgtatattcttatccaacgtctgactcaccttaatctttaaaatattacaccacattatagcataaatcctatagtgcttgaagttaacaaaattctatcaacattagttaaatagttatcataacaacgtcagtaaaacaaaagtcattttgcgttcattgtcccatttaagtcctttccccaacttacgttacccgttgactttctctttgaaagtctttgtgttggggccctgctacaattaaaaaatcttgatatcctgtgtttttaatttaattatctacttctatgtaatgaaaaagagtctaagacgcttatgttttaagtctcagactctatttttccaagctattatgttttgaatgtcaccattagtatcatggtattacttttttctttctaatatgtctgcttttgattcaagttcaacaatatcataatgatacttttctaaaagtgttctatatttatagaagaaaatgatgccgaaaccgattgatgatacaaataataagatatttttcatttgttgtcctctttactccataaattagatatgatcttttaaataattatatcattaaataacatttttatacatttcttaataactaaatgagattagctgtaccttatttcctaggaataaatacttttgcttcactatcttctggataataatacgcattagggatcgcttgcaatcaatgcattaaaaggcgatttgatataaacgcttttactgtctttagtatcttcataagttgaattatcctgtgtttaagacaaaggctcggctcttgcacgcttggcctcttcgagtacaccttcaatgtgatctaccattaataatatatgattaaagtctaaatcgtcgaatttaagcagaaattttaatatgaagatttaagagttattagtaaacaaactgaacaatcttttcaacagatttatcatcatgtaatgaaatcagtttatcagttttataatgttggagatactttagaaaaataaaaactcgagatactcagtcattgaatatgcactgctgagtgtctcgagttttttctaatcaaatgccttaaataatgcctcgtttgagttattccacattgtttcattatgggatattaaaaattcttttaatatttttttattttcttcaccaatttgttcaataataaattgatgtttcatagacttatccatcatattgacatgttctggcatactcttataacctcgacgaatacttttatttacaagtaaataacatgcagtgacgcccgcgtaataaggaccattttcaccacgttcagtagtcacccaacataaccaatattccttagcttctggaccttccactgattctttatcagtaatccactttacgcctttttctacttccgcacgtgcatgcataccgccaatatcaacaaatgcttctttatttgcaacatcgataaatacaggtgcaatattatctaaactaatcgctcctatatttgtacctttatgaccatctagaggatcattttttataatattaaatttaaaccctttattttctgccacgatgattcctccaatacttctttaccttttcacactcgctattaaataatagcgtatattatcatcaaatatttaatttaattcattcaataaattaataattgaacctttcacttccgaatctttaatattaagaatcatttctttaggatagtatagtttatagtcttctcgattaatcccagtaatacttgaaatgactaacgattggctactaatttctttaatactaccatttcgtcttaacaaatggataggttgtcgattagaaccaggtcgatcataatcatatggtaaatctgaaaatgcttcactaacaaaataatattccgggtcaatgccaccttcaataaataaatcctgtaattcagtaattgtaataatcgaaccatcaaatggaatatacttaaagagatcacgattaataaatcgacgcgctaaatcacttaagatctcatcttcttcatgtatccatttctttaaataaaataataccattacttcatctaattctacatactgatcaattgtaattgtaccttcaaaaaatggaataaattcttttggatacattttaaattgatagtcttccttataaagctgtttgactcgcttaagacaattatttaatagtacttctccaccacgacttacgggatgaaaatagatttgccaatacatttggtaacgactcataataaaattttctacagcatgcataccactttctttaataagtacttcatcttttgatggtctcattaatcgaagtatacgctccatatcaaatgtaccataagatacaccggtgaaataagcatcacgttgcaaatagtccatacgatcagcatcaatttgagatgaaatcatggaaatgactaatttatttttatgcgttttattaataacattggctacttcctgaggaaaggtctcagacactctacttaatacttcgttaacctcagtgtttccagtaataatttcttgggtaaacgcttcgtgatccgtattaaatatcttctcaaaactatgtgagaacggcccatgacccaaatcatgtaataaagctgcacataaagcaagggggcgatctttattattccatgcttcacgcccaacaaatgattcatcaatcatacgtcttacaatttcatagactcctaaagagtgtccaaaacgactgtgttctgcagtatgaaaggcaaggtataatgtacctaattgcttaatacgacgcaagcgctgaaattctttagttttaattaaatcccatatcagttgatctttaacatgaacatacttatgaattggatctttaaatactttttcttcagctaattttctagttacataagatgattgtgtcaaattcatcctcctctttcatacttgctttcatcagtagtaatatgaatttaagttaattaattcttataatactttcttcattaatgctaaatctaattgttcaccatacatttctggttgatatgaacgaattatttcgaaaccatgatgttgataataatgaatagcttctttgttcttattatcaacttctaaaaagaccgtatcatattcattttcaaattcttgtaatcctttttcaagtaaacttgttccataacctttatgttgtacacctggatgaacataatgggcagctaagtacaattctttaccatagataaagttagcaaatcctacaatttcattattttcttcaacaactaaaaaaagttgatcttctaatcgcttttttaaatggtgttcattatacgaagctgctaataattcattaattgttgatactgcataaatatttaaataggtattataccaagcttttgtagctacatctcttattgctataacgtcattagttgtcgcttttctaactgtatacatgcttcattctcctgacatttcattgtaatttaataacaaaattatatcatagtatattaataaacgctttcactcaactttaagatgcatcttattaagacagtactgcattccattcctgtgctctttctagagcatatacatctttcataacatctccaagtctttctgctgtaccaataatataaccatttagttttgctccgagaaaatccaaactatattctaattgtttaatgcaaggtttcgcttttactttcggacaatctcccccaactaagattaatctaaaatcaatgttagacattttagttttaaaattctgatatttaggatcgattaatgattctgaccaatgatcgataaatgcctttaaagatgctgacacactataccaatacacaggggatgcaaaaataactgtatcactttcaagcacttggtcaataatcaattgataatcgtctatgtatgactcaatttgctttgattcgtgtctataatctcttacaggtttaaaatgatattgtgttaaatcaatccaattatattgtttgccttctagagcatattgtgttaattgagcagtatttccttgtggacgacttccaccaaataatacagtaatcatatatcttacctcttttttagtttatattattaatgtattttttctatttacttattatgtaccccatctttttacttttatttataataaaaactcctacacctatataaacggtgtaggagtcattattacttttatttagcgtactttattcaactgggaataaagtatctattttcttaatttcttcttcagtcagttcaatatttgctgcttcaatgttttctacaacttgatcagcacgtttcgcaccaggaataacaacatcaagtgctggacgtgttaagtagaatgctaatacaatattagcaatacttgtattatgagtttcagcaatacttgataattcttttactcgacgtacgttatcattgaacacttctggttggaaatcacgacgcgttgcacgatgatcattgaatgtttgattttcttcatacttaccagctaaaataccagaagctaatggaaaatagggtacaaacgtaatatcattttcagctgcgtatttcattacttcttcattttcacgatgtagtaaattatattctaattgaacaacatccacatatccgtctttattcgcctctttaagttgatctaacgtaaagtttgaaacacctattgctttaatttttccttcttttttaagttcttgtaatgctgccacagcttcatcttttggtgtatcctcatcaggaaaatgaatgtaatacaagtcaatataatccacttgcaagcgttctaagctctcttcaacttgttgttttaaataatcaggttggttattttgaacaacatcgccattatctttaataacatgtgaacctttagttgcaatttgaactttttcacgaggatattcctttacaacttctcctacaagttcttctgagcgtttaggtccataaataaacgcagtatcaattaaagtaataccattatcaatagcttttctaacgacatctttcccttgctcttcatctaaattgggatataaattatgtcctccgactgcatttgcgcctaatgcaactggaaatacatgaacatcagattttcctaattgtacaaattctgccatgatattcacaactccttaaactatagtttctatttatagtttacccgattagtaatgataaattcattcaatagtgtttaaaacattaaatttgacatagtctttattttatatttaaatgtaactaataaagttacatttaggaggtgaatcatttgaatttagaatttaacattgccgttcacgtacttagttttttagtaaaacacgataaccaacaattcagtagtcaaactttagcaaaattaacctgcctcaatccagttcaattacgtagagtgactactgttttaaatcaatatcagtttattaagacttcccgtggtaaaaatggtggatatagtgcaaatcattcaactgctagcattaaactatcagtactatatcgtatatttgtgctcgaaaaagacagccaacagcgtattttcacaggtcatgagcagagcgattgtgaaatatcaagaaatatagcaaagaccatgtcacactataatcaaaaagaacatcatgttattttaaatttttatgataccctcacaattaatgatgtaattaatgatacacttcaggaggatacaacatatgacacattataatttaatcgttattggttttggtaaagccggaaaaacacttgccaaatatgcatcatcacaaggacaacaggttgctttaattgaacaatttaaagaaagctatggcggcacatgcataaaccatggctgtattccgtctaaagtgcttgttaatgatggtattaaacatgtcgatttttcaactgccttttcaagaaaaaaagaagtagtcaacgcattaaatcgaaaaaactatttaaacttagaaaatgatgaaaacattaccttgttaaactttaaagcacaatttaaatctaatacagaagtcgaattaattgatgaaaaaggtaagttagttcaaacactgaccgcagataaaattttaattaatacaggcgcaaaatctaatgttccaaatattgaaggtatagactcagcacaaaatgtatatgattcaaaaggtctattaaatatttcttatcaacctaaagaattagtgattattggtggaggatatattgcattagaatttgcctcaatgtttcaaagcttcggtacaaacgtaactgtattagaatataataaacaatttatggccagagaagatcaagaaatagtcatacacatgattaatgattttaaagataaaggcgtacgtttaatcactaatgttgaaacaaaagcattaaaaaatgaaggtgatttgacaacagttgaaacttcacaaggggactttactggtgatgcaatcttacttgctacaggacgtgtaccaaatacagatttagctttagaccatacagatattgagttaggcactcacggagaaataaaagtaaacaaccatctacaaacctctgtatcacatatttatgctgctggagatgtaaaaggtggattacaattcacttatatttctttagatgactttagaattttgaaatctgaattattcggtgaccgttcacgacacactgaaaatcgtggtactatcccttatacagtatttatcgatccaccgctttctcgtgttggtatgaccgctttagaagcacaaaaattaaattataattacgttgaaaacactttatttattaatactttaccaaaacacaaaattaataacgatggtcgcggtcttttcaaagttgtaatcaataaagataataatgaaatattaggtgctactttatatggtaaaggttctgaagaaattattaatttaattaaacttgctatcgaccaacatattccttatcaagtattacgtgataatatttatactcatccaacaatagctgaatcatttaatgacttatttaatatttaataaagaagctcgtaaacccattttttaatgagtttacgagcttctttatcatcgatatagattatttacttgctttacgctttgctaatttttcttttaattttctatcttgttcttctttacgacgcttacgttcttcattacgttttctcaaacgttcttcttcttcaggatcacgtggtttttttaattgtgcagtgactttttccataagttcatcttcagtcaatgcagcaagtgggcgattattaacaaaagcaaatgtcttacggcgaccaggaccacagtatgactgacagcctatttcaatttcagcatcaggatctaatttttctaattttttctttaatgattttaagttaactgcctgacattcgtcacaaatcaaaaatttattcttcacttcgctacccacctttatattattttcactcatatttacttccattcatttattacaactctaattattttactctttttaattaaaaattcaagcactaaaaaagatttgctataaataaaaagcaagacatatatttcttaataaaatgtctcgcttcatcataatagtagtcttattgtccgtgatatattttaaatttcaaaggtttaatgccttctttttcccatacttcataaatagagggcttatcaactctattatctataattgtaatgccacaatctcctccaccagcgccagaagtttttgctgcaccgccaaaacgttcaccaatatcacataataattttaatttttttgtttcaatatcaaccgtcgcttctttatccatttgctgaattatactacgattttgacgaatcattttttgtacaccttttatattattcgttttaaaagcatagattaaattttcaacacatgtatttgattgatcaagaaactcaccataaaaaatagggtcagattttaaacgcttgacttcgcttactaagtgaggcgacgaagcaggagaaccggtccatcctatgaggacttccatattttcaggcgcttgtaaaggttctatatgaagaccaggccagtttttttctaatacttcttctacagaggtttctttcatttgttgctttacccattcgtgatcaaacgtactataggcaagccatccactataaacactaacagcaatatctccgcatgaacttaaactttgtaatctcatatttgaaataaccgcaagcttatatatataaagatttgataactccatttcataaaattcatttagaaccttaatcacagatactaaaactgcagcactagaacctaaaccatacttttgtcctgatgcatctgcaagattactatcaatagtaagatggaaatgttttaattttatattacaacttttcgcatactgctcaaatacttcaatagcagtcactacatatttgagttgattggctgcatgtacatctgatatttctattttatcttcattacgattaaatgtgacaggttcatagtgtaatgttttagaatgaatcgtacctgtgatttcatttgaagcttcaatagcagctgtgacaaaacgatctactgcaattaacactgatttatatcccggctcggttacagcatattcgcccgctatatacagttttcctggcgcttttgcctgaatcattatatctcttccctacttaattatttcgactcctgcgtgtgtaatatcacttgttataatttgatctttattaaatacttttaaaaattgattcacaatcgcttgttgatgtttcttttctattagaacttttacatttggtcctgcatccatagtaaaataacaaggtaatcctacttctctacattcatgtacaattctcatggcttcgtagctttccggcacaagatatgtaaatggtggctgtgcacctaaatttgttgcgtgcattctcaaaccgtttgcctcaatcacttcacccattcgtttaaaatctttttgggcaatcgcttgttttgtgacttttaaatcttcctctacatgatctaaccagtattgataaaaacgtgaggtatcacgagttaaagacatacctgaacgacttgatactttctttgatttattgttaataactacaaaaatcatagctaagtcattctcgaagccatctgactcaatttgatgggcgtaagacgttttatcatcataacctttttcccattcagcaaaaccaccataaatacttcttgatgctgatccagaaccacgacgagcaaggcgagataaatctttatctgataggtttaaatcaagcgcttcattgcaagcaccagctaaagctgcatatgcactagctgaagaagctaaaccggcagcagtaggcacaaaattatcactttctattagtgcatacgttgaaataccagcttcttttcgaatcatatccatataacgttgaattttagcactttctttagcattaacagcttctttatttaaaataagttgatcttctgttaatgagtcatcaaacgttacacgtgtttctgtatagaaacgctctaatgtcactgataaactattattcataggaataattagattttcatctgcttttccccaatattttattagagcaatattcgtatgggcgcgtgctttaccactttttttcaaagatttatcctcctaacttttcaatccaagtatgttgcgctccagctttttcggctgctgcaacaatatttttagcagtcacttcttctttagttagaattaacatgctacctcctcgtccaccaccagttaatttaccagctactgcaccatgttgtcttccaatttcgagtaatgtttcgattttatcgtgactaactgttaatgttcttaaatcgtcttgacattgattaaatatattagcaagctgatcaaagctatgatggttaattgcatcactagctaaataaacaagagagccaatatgttcaatgacattcatatatgactcatcgttatcacataaacgatgtacatcttcaactgcttgttttgtagagcctttaactcctgtatcaataacaaccatatagccatctaaatcaagggactttaaaatttcaacttctcctttttgataccaaacgggttgattcgttacaatcgtttttgtatcaataccacttggtttaccatgagcaatgcgttcagcccagtctgcattttctagtaattctttatcagatagcggtaattctaaataatcataacttgctcttataaaagctactgctactgctgcacttgaacctaaacctcgagaaggtggtaaattagcttgaattttaatcaacaatggctcttcaacatgattgttttctacaaaatgtgtaataagtgattttaaatgatcaggtgcatcgtataaaggaccatcataaacatcactctgaattgctgaataattacctttttctaagctttcaataagcacttttacttttcctgaagtaaatggaatggcgattgctggctggccaaaagttacagcatgctcaccaatcaatataatttttccgttagattccccatagccacgtcgtaccatgatatctcacctttaatattctttctaaaatgatttcaacattcattaatgttattttaaaattgaacgtatttgtacatgtcatgtcacacatatgtttatactcatttacttcaaatcttgcatttgtgttaatacatcaataaatagtataaaactttgtcaaaaatagttcaaaactttgaaatatttatatcctaaaaaatgttataatcaacataattatggttaaattatcgttcttaaatgaatccacctcatctatattactataaaaaataataagaatgtagcaatttttatatttttgaaggtaaatatatactttagttgtatgattgcatgctaaaaagggagtaagctaaaattcacttagaatttttcttactcccttttatcttattttaatctaaggaacgattcattttctcattacgttcaatcattttatcgaaatatccttcataacgttgccactcatcctctgtaattggattcatatttagctggccacctaagtctttaatcgcataaagtaattggaacatcacatcttgaactttaatgtcccgatgaagtaatgtttccaaagatgccatacattctggtttaatatccggatatttaaatttcgtaacttcacctttcaaggcacgttgataaaattcatgcatcatttcagctctttcttcaccagagccttcaacacataaataaatttgaactgcaatacctccacgtacccgtcgttgtgaaataccagcaaatttttttccatcaatacttaaatcaaatcttccaggacaatatgaatgctctatttctttagtatctatatctacattttcattttcgaacattttacaaataagtaaatacatcactgtgaatgcttcatcaatggttgtctcagtttgtcctttaaaaataagcgaaatatttaaaacaccttggtctaatacaaccccaagaccaccagaatttctaacgattgcattataaccgatctcgtcagttaagtattgaataccgtcttttaaaaatggtaaacgtgaatcatgtatacctaaaatgacagtgtgttggtgaatccatgttcttacaacgttacaagatatatcttttcctacactttctgaaaacgtgtcatcaaatgcaaatgactgcattggcgctaaacctgaagaatggtctatatagcgccaatgaatgtcattaaaatacttacttgctaaatccattattgtaatgtttgagcagcagtaataattgataagttataaacgtcttcagtagagcaaccacgagataaatcatttacaggtgaattaagaccttgtaaaactggaccaatcgcttcaaatccacctaaacgttgtgcaattttgtatccaatattacctgcttctaaacttgggaatacaaatacatttgcgtcaccttgaatttttgctccaggtgcttttttctctgcaactgcaggtacaatcgcagcatcaaattgaaattctccatcaaccactacattatctaaaccttcagattccactttttcttgtgctaattttactgcgttagcgactttttctacatcatctgatttagctgaacctttagttgagaaacttaacatagcaacacgtgggtccataccaaagctttttgctgattttgcactttctacggcaatttctgctaaatcagaagattctaatgttggattgatagcacaatcaccaaatatatattgtttatcttctttaatcataaagaagataccagatgttctagatacgccaggttttgttttaataatttgtaaggcaggacggacagtatctccagttgaatgtgcagcaccacttactaatccatcagcatgaccagcgtatactaacattgttccaaaatagttaacattgtttaataattcttgagcttgttcttcagtagctttacctttacgacgttctacgaaagatttgactaattcaggtttcaaatcacttttagaaggatcgataatttgaatattagagatatctaatcctttatcttgagctaaagtatttactttttcttcattacctaatactaaaggtgtaacatagtcagttgcttgtaactttgtagccgctgttaatactcgttcatcttcaccttccggtaatacaattctaacgttttttcctgaaagtttttcttgtaatacatctaataaactagacataatgccctcctcaaatttttaaaataatagtatgttcaccttaattatactttatttcttttaatatttctatttcattaatttgtaaacttttaagtatgtgtgacaattctctttatgataaaatttaatttgtattgatagaaaatatagttaaaggagcgatagatatgagtgaagcagctgaaacattagatggttggtatagccttcatttattttacgctgtcgattgggcaacttttagattggtgccagaagatgagcgcgaagcaatgattaatgaatttaaagtatttatcgaaaataaagccactgccagagaaaaacaagctggagattatgctttatataatattacaggtcaaaaagcagatattttattatggtatttacgtccagaaatgaaagaattgaatgaaattgaaaatgaattaaataaattaagaattgctgatttcttcattcaaacttattcatatgtatctgtgattgagttgggtaactatttagctggtaaatcagacgaagatccttatgaaaatccacatattaaagcaagattatatccagaattgcctagaacagaatatatttgtttctatccaatggataaacgtcgtaatgaaacatataactggtatatgttaccaatggaagaccgtaaaaaattaatgtataaccatggtatgattggacgcaaattcgctggtaaaattaaacaatttattactggttcagtaggttttgatgattttgaatggggcgtcacattattctcagatgatgttctacaattcaaaaaaattgtttatgaaatgcgttttgatgaaacgactgctcgctatggcgactttggtagtttctatatcggccatattttaactactgatcatttcgatcaattttttgcaatttaatatataaatggagcaaagactagcatagtaaacgccagtctttgctccatttttcaataaattaatatatttatataagacaattagtttccgagataaagtacactttttacaaagtgtacttcaagtagtgtggtttgggagaacttcattactactctgaacattaacaaatcacaaaagtgctgtcgctacccagcacaattttgatttgttaactattattatttaaccgaattgtaatgttctgaaacattattgttataaatcaattgtttttaacattaaattttattttcattaaaatatatttacctactattgagatataaatgaatggtcatcatattatgattgttaagttttataatgtaaggtagttattttcatgtacttctactataataatgattacatcttaatgaatggtgatgaaatggaaaatacaaataagcaagaacatatagatgaaactttaatcaaagacgtcgtcatgatggctggacgtatattacttgaatctggtgcggaaggaacacgtgtagaagataccatgacacgtattgcccgaaaactaggatatcctgaaagcaatagcttcgttacaaatacagtcattcaatttactttacataacgaatcttacccccgaatatttagaattaattcccgtgatactaatctcattaaaatttcacaagcaaatgaaatatcacgattaatcacaaaaggggatatctctttagaagatgcaaaagagcgattagaaaaaatatatattgcaaaacgagatagtagcttaacatttaaagggattgctgctgccattattgcaattagtttcctatatttgcaaggtggccaatttatcgatgtgattactgctctacttgcaggtagtattgggtatctggttgttgaaattctggatcgccgattacacgcacaatttattccagaattcgtcggttccttagttattggtattatcgcagtattcggtcattggttagcgccaagtggtgatttagcaactattattattgctgcagtcatgccaattgtacccggagtactgattacgaatgctatacaagatttatttggcggtcatatgatgatgtttaccactaagtctttagaagcacttgtaaccgcatttggtattggtgccggcgtaggttcgatattaatattagtttaggagtacgcataaatgttttggttatttaattttatatttagttatacagcttctctctttttctgtgtcatctttgacgctcctagaaagctgtatctatcgtgtggttttgttggagcttgtggatggatggtatatattttattctaccaaggtttgaatatacatacgatttattcaagtttcttcggtagctttacattgggtttaatcagtcattacatggctcgtaaaaaacgtgaacctgcaatcattttcatggttactggtattattccattagttcctggtggacttgcctttgatgcaactaaaaatctagtattattacaatttggtaaagcaatcaatacaatgctcgaagtcacacttatcgctggtgcgattgcattaggattattattcgcagaccaaatttcaaaaatcatcgtttctggtttcgctcgacgacgtaaacgtatataaaaataaaacgcgagagattgttggtaattcaccctcatctctcgcgtttacgtatattattttttatcttttatcatttctttaacttctcgttctgattgatttaaaatcagacgacttaattcgtcattattcatattttttaatttagggtatcgaactacaaagaaaatgagacccatcactaaccaactacccaatgcaatatatgaaggcattgaaagtgaagccggtgatcctggaactaataataaaagtaaaaagataaatgaaacaatagaacctaaaatagcaaaggtcttataaataggaccatacgtattactttgtttattgtaactaaatagcttagcagcagataaacaagtaataaaataagcaatcgatacacctgttgaagacatatcaacaatccatgtcaatgcggtacgtcctaaccatggcgcaattaaagtaatagctactaaaaagataatggctacatagggtgttttatattttggatgtaatttgctaaacgctttaggcatgataccagcacgtcccattgagaatagtaatcgacttgaactcattaagaatccatttaatccagtaaaaatccccataataatagcaatcgctaatattcctaagccaatataaccaaaagcagtttgtgtttcagcgcctgttaaccataaatttccattaaagttcgcattattcgtacccaaccatcctgtgtataaaatcataatgacataagttaaagctgccgctaataaactgtatacaatcaatttgaacgttttgtttggcgaaaaattaaactcttctgctgtttgtggaatattatcaaatcccacataagcccatggtgcaatagctacaatcataataatggaattaaaccatccaagctctttacttgctaaaggttgtaagttgcttaacgaaaagttatttccgaaaaatgaacctacaaacataagtacaacaacaatgaccattgctacacaaaagtaatattggagtgtaccagaaacacttgcaccacgaattgcaataaacataaatactagtaataataccgtagcaataactatttctgttatgtaaacatcccatccagcaatcgtatataatcttccattattcaaaatgtttggcagtaaaaacttaattaataaactaaacgctgtcgcatttaacgctactacacaaacataaccgaatgttaagaaccatgatgaaaagaaactcacatatcttccaaaacttaaataactaaacgcgaatgcgccgcctgacacaggaaaacgttcgactaatgcgccataacttacagcaattaatatcatcaataaagcaccaatgacaataccaatagatgaagcaatcggacctgattgtttaatccaatcaccgggcagtatgaatgctccccatccgatacacgagccataagcaatcgcccaaacaaatttttcagagaggttttgttttaaatctcctctatctatctctcgatttttatcattcataaataaactcacctcaggtacttaacatacccaaaaaagtgagtttactaaccaaaatataaaatattattatccagcaaatttaaatgttgcaataattagcattaaccatcccacaataaagagtacgcccccgattggtgtaatcgctcctaaaatacgaatttgagtcaatgcaagaatatataatgagccactaaatagcacaataccaaagaacagaagccatcctgcccaattcacattaatagaagttgtaccactaatgatgccaatcataattaatcctagaccatgatacatttgataattcactgctttttcccatactgacatatatttatcagagagttttccttcaagtccatgtgcaccaaaagcgcccgtaccaacagacatcatcgtacacaatgcacctaaaattataaatattttcatcataatgttttagttctcctaacttagttttaattaaaaatcaaatattgattcaccgtttccaatttcatcatccgtcaccatcatattagacgatttattttgatgcttcattgtttgtggaactttaccacccatcgcttcaatttctgcagcagtaatcgctgaatgatttgaaggcttatttgaaaacgaagattcagaagttacaatattagtaaaatcatgttttgattttttagaaggtcgttttgaaacatcggaataaagagatgttaaagtatgaatcgcatacatatgcttttcaaactgttgttcatcttgagcttcatctgcctgcactaattcgtgttctataagttgaattaattgttctttgttcaattaagattccccactttcgcaccattgtattggtgttttaccttttgattctaaataatcatttgtacgagagtaaggtttagacccaaagaagcctcgataagcagataatggacttggatgaacagatttaataatatgatgctttgctgtatcaattaattttatcttttgctgcgcaggttttccccataagataaagacaacatcttcgcgataatctgaaatagccttaataatttcatctgtaaagatttcccatccaatgttcttatgggaatgcgcttcacctttacgtacagttaatacagtatttaataacagaacaccttcacgcgcccagtcttgtagatgtggagaagttctatgacagccaatatcatcttctaattcttgatacatatttcttaaagatggtggaaatttagcattgggttgaactgaaaatgctaacccatgtgcttggttaggtccatgatatggatcttgacccaaaataacaactttaatatcttcaaatggtgttaaatcaaaagcttgataaatattttctctatctggatagacgatttgtgtcgtatattctttttctaaaaaatcatgcattgctttaaaatcatgttttgttgtaatgtcatgaaaaatgtctgaccattccatcgttttcacctcacttctattttaacataggacccctctgaaacgtgatataaatcgccttactattttcatgctagaacaatagttgagttacatgatatgataaataaagatgtaaataattgacaggagtgataatacatggcattaaaaaaagtattaacaattgccggttctgatacaagcgctggcgcaggtatgcaagccgaccttaaaacatttcaagaactaaacacttacggtatggtggctttaacagctgttgtaacaatggataaagaaacttggtcccacgatgtgacaccacttccaatggatgtattcgaaaaacaattagaaaccgtcatttcaattggtccagatgctgttaaaacaggtatgcttggaactgaagaaatcattaaacgtgctggcgaagcatttgaacaatcagatgcaaaatatttcgtagtagacccagttatggtatgtaaaggggaagacgaagtacttaacccaggaaatacagatgcaatgattaaatatttattacctaaagcaacagtcgtcacacctaatttatttgaagctggtcaattatctggattaggtaaattaacgtcaattgaagatatgaaaaaagctgcaaaaatcatttatgatcaaggtgctcaacatattattattaaaggtggtaaagcattagatcaagataaatcttatgacttgtattatgatggtcaaacatattatcaattaacaactgatatgttccaacaaagttataatcacggtgcaggttgtacatttgcagcagctacaacagcttacttggcaaatggtaaatcacctaaagaagctgttattagcgctaaagcatttgtagcatcagcaattaaaaatggttggaaaatgaacgactttgtaggcccagttgatcacggcgcatacaaccgcgtagaacacatcgacgtcgacgtcaaagaagtttaaagaagtactgtatttttgaaaaaaatgctagtacttcttatgcaaaagacactagtcttttgtaatccttaattagatttcattgtccttccccgacaaaagcgattagagttgaaagaagctaatcagcgcactttcaattcaatcagctactgtctgtactgtatttttgaaaaaaatgctagtacttcttatgcaaaagacactagtcttttgtaatccttaattagatttcattgtccttccccgacaccccaactcgcgttgatcgttgactttcattttgaaagtctctttgttggtgtcccagcattagagttgaaagaagctaatcagcgtactttcaattcaatcagctactgtctgtactgcattttaaaaaaaatataagcacttctaaagcttttaatcttgtgtatgatagtttggtcacactaggattaaaagcttttcttatatcttcattatcttctaggtatttagtcgtagtatgctctacacagttcgttgcagtaaaagttagtaccatagactcatgttttttatcataaaatccattactatattaagtgtagagagacaaaggaggaattaacaacatgattatctacaagcaaaatatagaaaacggtatcccaatatacgaaatcattacaaagaccttcaagacgattacggtaaaattcgatgaaacgtttagtaaaaatgacatctatcaattgctctctctactagaaagtgacgttgataacatgaaattaagttattcatcacatttcaaaaattaaaaagtgtttttcgtaattgaatacgaaaacagacgaatatttcaaaatctttttttaaagttaagacgcccctaatactcaaaactttaaaaagtcattaattattcaaaagctcaccctaataaaatagcgttaatgttagtccaaaatgtccccttttggaaacttagagagaaactttaagttatactaacattaacgctatatttttataatattgtttcttttttaacacctatggtaggttatcaacggttaaataaataattataaatcagtatgattactttttttagtaataactattttttcttcaccatttaaaccaaagacgtttatttcattatgattcactttttttaagataacttcttcgtctatatctataatctttctatacttaacgttaaattgtgtccactctatttgaaaatacgctaatacacaatctactaccagttgaccaggaacaatggttgaatgaagctcatttttatcattaacaaggcgaaggtaatgactcactttatcatgactaaacctcatcatttacctccttttttataaatgtttgcctaataaatatacattgtctattatctttatatatttttaaatcgtagatatattggatatatgttttaaactttttcgtacttttatgtgttaagtacgcctcatattttagcctacattttaatgattcaaattcttcacatgttgttcgcacaagaagaatattttcttgttgaaacttttggaacaacttaaattttggccaaacgtttgcacacatgagtggaggcaccacgcctttatacgttctttcaactacttcgcaatactctcttacttcttgttcattaaaatatatttctattttctcacaagccccatcgttcgaagagtatcgcattccccattcctcctccaatccccatcgtagcaactccccgcttccaatgtgtcatatttaataacctagtgattaacgctacgccacttgcgctataaggatgaccagacgcaatggctccaccccactgattgacttgattaatatttaattttaactcttgaattgaagctaaaacttgtgaactaaatgcctcattaagttctattgtatcaatgtcacttatttttaaattttgttttttaagtaattttgttacggcaggtactggtccaatacctagtcgtttcggattgacgcctattgttacagcatctgtaaacatcatcccctctgatatgccgtattgtaatgccgtttcttgattcataacgagtgcaagcgcagcgccgtcatttttcatacaactatttccaaccgttactgttccgttagcaagtaaaggacgtaatcgatttaatcgttgttcagtaagtgttggcttaatactttcatctttatcaaatagatgacctttgatgtttaaagatacaatttcattacttatacttccattctcataatattgatgcgtgagatgatgactacgtatcgcaaaagcatcttgttgtttacgcgtaatatgaaaatattgcgcaacattttcagccgcctctatcatacttggatcttgaccttttggtgcaaaagaagcacgctcataaaattctggtaattgggtatcatacactgattgaggccgtttaatcttccaaggagcacgactcgtgctttctactcctccagctatataaatatgacctgcacccgcttgaaccattcgacatgcatatataatactttctaaccctgatccacattgacggtccattgtaacacctggaatactctcagctagacctgcttctaataaggctttacgggcaatatttccaccattacctacgatatttccaatcactacatcatcgatatcaggtattattttaggaaaagttgaattcatttcttcaaataagggcatgagtaatgtttcaggttctaaatgtttcaatttcccaccatatttgccaaaaggtgtacgcttcgcccatataatgaccggttggttcataatttaaagtctccttttacataggcagtacgcattttatttcgagcaactttgccactttgggtatattgcatcctgtctacttttataaatttggaaggtacatcatatcgcgatagaactttcataatatattgtcgcacagtttggtactcaagttctatcgatcctgtatatagtaaaactgctatttcaccaaaacgtggatgcggttctcctataatcaacgcttcttctacgccatcaatattttttatcatttgttcaataacttgaggataaacatttttacctccaataattaatcgttcattttgacgactcactaaatataattgattatctttaatataagcgtaatcgcctgttttaatccatgtttcaggtaatacgacagattgatttacatacccagagaatatcatattactttttacatttaatagccctatatgattcttgtctttttcctctaaaccaatcgttacattttgaaatatgtatcccactgaatcaacagaagctttacggttaatgttataactaataaaacttgcttctgacgttccaaaaaattcaataatattagcatgctgaaatgtttcggctatacgcttaaacaacgaagaagagagtttcgccccactacttaaaatagtcgttaaatgtaggtgatcgtgatttatttttgttattgcatgtagcattgttggaacaagaaataatgcactatttgttgtttgttgtttcattttgctaatgagcttagtcgcattaaaacgggtttgtccaataaatgttctccctgtatataacgcataaatacaagtgtataaagacaatgaatgtgcaagtggtcccggtgctacaagtatgttttctttatgacgaagtagcttttcattttctttgtatgacgcaagccaagatggttcatttcgataatatgctttaggtaaccctgttgtcccagatgtaaaaccaatatgtagtagttgatggacttgtgactgctcatttaaatgtgttggatatgtttcagaagactttgtctttatcagtctatgctgttcatcaacaagatagtcaatatgatacgtttcaatcagttgatgaattgttacttcagaccattgatcatctagaaaacaaggaatacttccttgttctaatattgcaaaataattcaacatattatgtaaaggacttttacttaacaatcctactcgggaccctttcgataaatgcatgaagactgattttaattgctgtattgctgtataaagttgttgataggttaatatactttcttcaaacgatagcgcaatcgtatccggttgttctattgaatagtgatttaatttatttagtatttctaacatatgaccctctctgaatgttaactagattaattattatattaacattatatgaaaaataacacataaaaaaatcactcaaatatattcatctgaacgataatatatttgagtgatggtttttattctaaattagcatgattgtcttgcattgcttcttcattaatattaaaggcatccattaatccaatcacgacactatctaaaaagataagtgaagattgttcaaatagactacctaacggctgttcagagccttctgcttcatgtttcgttcctgcaggtaaagtaatcactgtatcagcgacatcgccaattttagattcttttttagttgttattaaagcaattttagcaccaactgaatgtgctttttcagctaataatcttaggtgctctgttgatccagaaccggaaataataattaataaatcatgctctttaatagatggcgttgttgcttcacctattgcagatgcatcttttcctagttgattcaaacgcattgcaaagctattagcaacatatccagagcgacctttaccagctgtaaagatacgagatgcgccaaccacttcatttgcaaaacgtccataatcattatcctctagatgtgataacgtgttatctatttcttcaagaattaaatgataattgttaaaagttggcattttatttaccttcaatcgcttcacgacattgtttagctgcttctacaggatcatctgcgttagcaataccgccaccaacaataaccaagtcaggttcttctgctacaatttctttaattgtttcaggtttaataccgccagctacggctactttagaatttttaatgactgatttaactgtacgtaagctttctaatggagattgtccttcagcttgtaaatcataaccagtatgaacagcgatataatcagcgcccatttcatctaattctttcgcacgtttttctaaatcttgtacagcaatcatatcaactaacaattgtttaccatgtttgtgtgcttcttcaacagcacctttaattgaagcatcttctgcaacacctaagatagtcacaacatctgcaccaaatttaatagcttggcttacttcatagtctgctgcatccataatttttaaatcagctaacactttagcattattaatattttcgtttaaatgttgaacagctggtaatccttcattaataacgataggtgtaccaatttctacgatatccacatattcttcaacttttttagctaattttgctgcttcttctttatttaataaatcgattgctaattgtaattccattacaaacatcctttcatatcatagtcgtagtagtatacatacccatgttaaatatttttaaacctttaaatcacttcaaattattttctttcatttataaataaattgagcataggtgtacaattcagtcgttctttttagtaaaatagatagatacacacattgtatggttgtaaggagtgaacgtgttggaacccattaaagctgaagaagtacaacgattgttaactacatttgaaaacaaacctgtctatttgcatgttgaaacgacgaatggtgcatatgctaaccattttgatcaacgtgtgtttaatgcaggtacgtttttgcgaaatatacaagtcacatatgaacatgcgcaactaaagggcggagataaagacccatttcgtgttggattgaaacttcgtgatggaggttgggtatatgtgcaaggcctgactcactatgaaatcaatgataataatgaatttttaatagctggatttaattacgaaggacaattggctgcaacgattgaaatcagtgaacagccattcacagtatagaggaggaagattcatgaaagatgaaagacatatactaatgatatttccacatcccgatgatgaaaccttctcatctgctgggacgatcgcaaattatattgaaaacggggtacctgtcacttatgcctgtctcacattaggacaaatgggacgtaatttaggcaatcccccttttgcgacaagagaatcactaccttatattcgcgaaaaagaattagaagatgctatgaaagtgattggtattactgatttacgtaaaatgggtttaagagataaaacagtagaatttgagccacatgagcaaatggatgatatggtaaaaacattgattgaggagacaaatccatcagtgattatttcattttatccaaaatttgctgtacatccagaccatgaagcaacagctgaagctgtcgtaagaacagtagaacgtatgcctaaagaagaacgtccaagacttcaactcgtggcatttagtaatgatgcaccggatattttaggagaacctgatatattaaatgacattagtcaatataaagagattaaattaaaggcgtttgaagctcataaatctcaaacaggtcctttcttaaaacaattagctagccctgaagttggtggagaaacacaaagttttctagaagtcgaaccttattggacgtatcatttcgataattaaaatcattagaggaggtacaataaacgaatgactgaatttgatttatctactcgagaaggtcgctggaaacattttggttcagtagaccctatcaaaggtacaaaacctacaactaaaaatgaaatgactgatttacaaagtacacataaaaacttcttatttgaaattgaagaagtgggtattaaaaatttagtatatcctgttaaaattgatcaatttcaaacagcaggtacatttagtttctcaacaagtttaaataaagatgaaaaaggtattaacatgagtcgtatcttagaaagtgttgagaaacattataataatggtttagaactggatttcgatacactatatcaagtattacgtacattacaagacaatatgaaacagaatgctgcgggagtagacgtttcaggtaaatggttctttgatcgttatagtcctgtaactcatatcaaagcagtgggtcatgctgatgttacttacggtttagcaattcataaagatcaagtaacgcgtaaagaacttaccctcacagctactgtaacgacactttgtccttgctctaaagaaattagcgaatactctgctcataatcaacgtggtgttgtaacagtaaaagtgtatttagataaaaattctgaaaggatagatgattacaaagaaaagattttagatgccatggaagcaaatgcaagctctattctttatccaattttaaaacgtcctgatgaaaaacgcgtaacagaacgtgcatatgaaaatccacgtttcgttgaagatttaattcgtttaattgctgcagatttagtagattttgactggattgatggctttgacattgaatgtcgaaacgaagaatccattcaccaacatgatgctttcgcaagactaaaatatagaaaataaataatcctccctatattgagtgaataaatatagggaggattatttattttttaaatatttttttgaattctgatggagacattgcacctgcgtgtttgtgttggtatattaaacgatttttaaatttctctttattattataaatttcttttaaaatacttgaaaattctttttcattattagaagtaattatattattaggtgccgttacatctgcgttatgtgtaatttctttttccgctagtattagtaagttataatcgaaagctgctctcactgaatccaatatttctttacctttattgatatctatatatatatcacattcttcatataactctataactttcttttttatcacattaggatataaatgaatattagaatatttattaagtgttaataatttattagacatagtagttaaagctgcaatatgaaaatcatactgtggattagattgtgcaagttgctctagatattgagtatcttttttcattaggaactattacttttaaatctctattaggtcgatttaaattgtgcattatatgtcgaataatattatcgtctatttcaccctgccaatataaataatcttttccattattaccagtcttattaattatagaaggtactcttaataaagaattaaatagaaaattgctagtttcaaaattcccttctttcaggaaaaattcataaaaatctattgatgaatcaaaaaaatattctttatttttccatcttaataaaatattatgcgttacaaaattttctatcaaaaatttttcgtttttttcattataataacattttaatagtcttttatgactactcggttgaattactaatctagcgcatctaaatccacacttatattaaaaatactaactcttctcacacaaattacttatccaaaatcaaaaataaaaaaatagccctcccaaatagtgggaagactattttcattgtagtagtaaactactttttatctgatctatttttacgacgttttcctgctaagaagagcgtaccagcagcagcaaataaagagccaagtaaagtgccattattttgttcattattacctgtttcaggtaatgctttagcttcactattattttgtttatgagtattatttgaagtattattatcttcatttaactctgatacgtcattgtttgaatctgtttgatcagtgttgttaacagacgcagtattatttgaatctgtagtagcgttattatcagttagactatctttatttccttcaactgaattattgctatctaaagagttattaccttcttcatcttttgaattatcttcatttgatgagcctttatctgctccgtcttctgagttatctccatctgatgaatcattgcctgctccatctcctgagttgtctccatttgatggattatcacaattttctcctacaacaacttttgttggggtagatactttaccatctttatctttttcaacaacagtaattacatcacctttatcaaggtctacgccgtctggaatatcaacagtccaattaccatcctcatcaatgttgccttctgaagtactaccatctgggaatgtaaccacaattgtgttgcctggtgtaccatctgttcccgtaacttcagtatcattatcatcaaccgggttaaccgttggcgctggaatatcaatcacatcacctactgtaatcgttgttgatgcttcttctgtagaaccatctggatacgttaccgtcactggtataactatagatgttcctggtactgcatcttccgaaggttttacagttaattcaccagtattatggtcaactgttacttcccatcctgatggaattttcgatttatcaatttcatattgagtgccatccggcattgtattatcaccagtttgtggcactttgactgtttctccaggatctactgttacattatcataacttggatcattagtattcgcttgtgtttcttctccgactgttacagggactttaacgtgatcttttgtgccatctggatacgttaccgtcacatctacttctgttgttcctggtgtattaccgtccggtaattggtttggatcatccactgtgatgactggttgttctttttcacttggataatctggaatcgttactgctccagttacatcttcttcagttgttggagtaccgtaatcttttgtaacttcatccgttgttggttggtaagcatcattatctgcttgttcatttgttgtcactggtactgtcacatgatcttctgtgccatctggatatgtcactgtcacaggtacatcgactgttcctggcgtattatcgtccggtaatgtacttggatcatcaactgtgattgttggtgtacctttttctgatggatnnnnnnnnnnnnnnnnnnnnnnnnnnnnnnnnnnnnnnnnnnnnnnnnnnnnnnnnnnnnnnnnnnnnnnnnnnnnnnnnnnnnnnnnnnnnnnnnnnnntcttctgggtaagtagtactctctgcacagtatacgggtgtgtgttctgacacatgtaggtgtgttagtgtggtatgtgtattactatgtgttgtgcaatctaggtagcttgatttttttcttcgatacgcgcggtgcgctgacagaagtatattctttttttttttttaatgatacggcgaccaccgagatctacacaaggagtatcgtcggcagcgtcagatgtgtataagagacagatatacattaaaacaactgctattattcctagcgctgcttccataccttcactgcaaaccatcttaaacgtactgcaaaaacgtattgtaatagtactgctaagacgaatgaaggtactgatactgctataactctgtctcttatacacatctccgagcccacgagaccagagaggatctcgtatgccgtcttctgcttgaaaaaaaaaaaaataacaaacacacacgttatcacacactccagacacacgaaaagtgtataatactgtcctctcccgtctagcagcactcacttcacctcaggattgtgtgatccttcgtaataatagtctcttgaaaacaggagtatgatggtgagtccgagggtgtagcggtaagtggtaagagaagatgacgaggttatttgtctcaatgagttgggataagcattgtagaattctttgacagggattagcacgctcgattttttttttttttttttttcaagcagaagacggcatacgagatcctctctggtctcgtgggctcggagatgtgtataagagacagattcacactacttgcatacataccaccaaatttaactaaatgcaccatgaataaatataatctataaaactctaaacgtttttctgctccttttcctaaaggataatgtttttcatattcattataaaattcttgtgtaaatccaccgaagacagtagtgatacctaggtcaaattctctatctccatataacggtgctgaatcaaataaggcaggacgtccatcttttaaaaacatataattaccaccccataaatcaccgtgtaaaagagacggtttactgcaagtttagttaagggttcttctcaacgcacaataaattttctcggcataaatgcgtgttcttgttataatatagacatcacatttagggtgcttattaaaagtagttttttataatctacttcgcaaaagcaaataaaaagccaatccattttatctgggttggctttttatttttatatgcctttatttgaattttaagggggcattttaaagattcaggggtaaatcatatagttttatacctaaaagtctatatacgcttttaaaacgcaaatatgagccaaataaatatatcttaatttcacaaacaaaaatttgagcaaaaccagtgactaattttttagacactgcccagttatatgcaaattaaaaatttagcaaactgggcagaaaaaaataaacactgcactgtgcactgcccatttacatgcaaacttaaaagttaacatgaaaactggtcaaccatgccggttgaacgctatagttcccgcaggggcaaaaagacataaaaaaacgctagctttttagctaacgtttcaaatcttttaaataataattttgtttttcaaaattccaaattgccgtaattgaatgtgctttttcttcttcgtctgttgttttatcttcgtcacttgtattaatcaaattgccatcttcggcatcatctaaatttaaaatcttatgtttttgtttaagcaaaccaccataactcaacatacgttttcgatataaacctttttctaaatcattcacgatttcttgatttctttcatcatcatcagttaaaaaatcagatgacttaaccgaatatttagaggtttctttgatagctgcttgaatatctttatcgcctttttgatttggtttgatcgctttaatatttgctacgggtcgataatttacttgtaatgctttttgccataaattaacccattcttcttgagttatataattagctttattcttaaaataactattttcaacacataataaaacatgcatatgttgattataactaccatcatttttattaactgttacttccgttgaacgcaaaaacccaacaagattttgcttcacttttttatatctacttaacctatcaaatgctttcgttaaatgtttcaaactttgttctaaagtatccccatctatcgcatttttcgttgaaagtgttaaaaataaccaacgcgcttttggtttttctttaacaacttcttcaatcactttttgagcttgataactatttttcatagcacgcctccaattacaaactgggcagagtttcgacttacaaaaccatgtcttatgtaacttcaaataaccttcatcagtcggcttgaactctaagacgttaccacattgttttacattaaaagccttttttatttttaaaatttccagtatatctgcataacttacattatctatcttcttttctctccatgggcgttgtttcccacttttcgtcatatctttaagtgtttcgttatcttgattttcgtctatacatctagtagtattatattgcatataaagagacctccagtagttgtttattgagtagacgctttaatcatactactggggtttttttatgtcaaaaattcctttcaacaagaaaaatagctataatcccttacataccaaggattacagctataattttaaaatcgagttatttctatatagtatcaagacaagaagaaactcgttttcaactcgtttcaaaaacctttcaaaaaccatcaatccacaaaaataccacgcgaatgacactcaaaatacaagactacaattaaaaaatacttagaataaaattaaataaaatacgaaaattaaaaggagttaaaaatgccttatatttatttaataatagccataagtactgaagttattggaagtgcatttcttaaatcttcagaaggcttttcaaaatttataccatccttaggaacaataatttcatttggaatttgtttctattttttaagtaaaacaatgcaacacctaccactaaatataacttatgcaacttgggcgggactaggtttagtcttaacaaccgtagtctcaataattattttcaaagaacaaataaatctaataactatagtatctatagttttaatcatagtcggcgtagtttcgttaaacattttcggaacatcgcattaattgctttattccaattgctttattgacgttgagcctcggaacccttaacaatcccaaaacttgtcgaatggtcggcttaatagctcacgctatgccgacattcgtctgcaagtttagttaagggttcttctcaacgcacaataaattttctcggcataaatgcgtgttcttgttataatatagacatcacatttagggtgcttattaaaagtagttttttataatctacttcgcagtacattaccagacggtaatacaccaggaacagtggaagttccagtaacagtgacatatccagacggcacagaagatcatgtgacagtaccagtaacaacaaacgaacaagcagataacgatgcttacgaaccaacaacagacgaagtcacaaaagatcacggaacaccaacaactgaggatgatgtaacaggagcagtaacaattccagattatccatcagaaaaaggaacaccaacaatcacagttgatgatccaagtacattaccagacggtaatacaccaggaacagtggaagttccagtaacagtgacatatccagacggcacagaagatcatgtgacagtaccagtaacaacaaacgaacaagcagataacgatgtagatatccataaagaccataatgacaaagcagatgaatcaaatggtaaagaattaccagatactggtaataacgatcaaaataatggcacattatttggttcactatttgctgcacttggaggattattcttaattagcagacgtcgtaaaaacaaaaataatgaagaaaaataataattagatttcatatttcataatgtagttcaaaaccaggccatagaaggcctggttttgttttaaacactaagatataaattaacagaactaaatatttaaaataaggaggaaacaaaagaatttgaaaataaattaacaaaaaagtaaacaaaaaacttttttacaatgtgtgagtatatttataaatgttatagagttaatagattaagagaagttttatcttacaatttaaatgacgaaacatttaaaataaatgtcttagtgtatattgaggaagaggttaatagttatttaggagacgatttatatctaaaaagtcctataaaattattgactcaattgatcttacgtagagcaaagaaagaacattatattagttatatgaaaattataagattaaataaactactaacataagatcacttatcgaaagtgcatatgctttaaaagatacagatggtataatagtggagtcgcctatctctcaggcgtcaatttgacgtagagaggaggtgcatcaaatgatagatattcttgttcacatcgtgaccacggcagcaagtggttgcattgtcacattctttgcgtattggcttcgcaaacgtgatgataagtaaaataggcgactaagccacaccaaaaacccctcactactgagaatagtgaggggtttggtgcatcaaatgcagatattcttgttaaacatattataacatcatagtggatgggaatgcaaagactagtctaaagactttttacatatgaattagtaccattaaaatgatttggttcgattaatctagcggcattaatcttcccttttaatgatattacttggtgctttagttcttggttattttttacattttcaaaatcttttaagatactaattcttaaactatttggaatcttcaactcataattttttaatataactcctgtgatttttgcaccttttttgaccgatttataatttgtttttttgtattttaaagagtgattaaatttccgagcttctatatcaatgtgattaatcaagttttggtagttaaaagagctatctttggaaaatgttaaatcatctacatataaagtcattttacaattgaatttttggctaatattaaacatattaatgaacatttcttcatatgcaaaatatgcgaggatttggctacttggggatccagttgggatatactttaaagtagttatatcagatagtaattttgcaacatctggagaagtcatcaatttttttgcaaaaaattgatatactctatcgcgagaacaattattataaaaactacgaatatctgttgtacagacatattgtgcaccgatatgataatgagcgttatctaaatatgatttttctttggtagatgatatgacccaatctggtttttctattttattgagtaaattgagcactcttttttgtatagatttcaattcctttttaggtgctgtaatttgcctttttttattgaaagtatagtattcttgttcaatagattttgaaagtctctttagattttttaaatcggttttaagtaaactagctaattttttcttagatttacatttataaaaagcacactgatggattggatattttttaaattgtttcaaatcattcttcctccaattcatcagtgtgtttatttaaaattttgattaaccttttctgtataaacatctcaggtttacttttacgtttgttttcactatagtcttctgccattaacataattgtagaaacttttatttcaaatatttgagaatatttatttaacaattctaaagaaggagtctttttactgttttctatttcagaaagatagctaggagatatattgatatcgtgagctaaatcttttgctgaaacggagtacagtagtcttaatttttttaaaatttctcctattttcataataattcacctctttattaaaagaatcaggaaggaactaacatattacttaaagagttcagtaatagaattaagtagcttgatgcataaatgggcaatctccagtaaatttttacaaaattgaaatttccatgtgctactattcttagttagttttactttttttgaagaacttttatattgtttcatagttttctactccttctgtgtctattgaattatataaaaaatatagacacccctcagaagaaatggtacaaaaaaagttcagccttcccaataattttcgtgttcggaggtcccctccgaagaacacgaggcgcttgtagcgccgaggggttctcgggctacgcaatcatcgtgcagcgccttaaaaggtagaatgaatagtttatattcattcctcgagcaaattgctccaatgtataggggattaccattaaaagttcttgtatataatatagcacgaagaaagtattttggcaaattaaattcgcttatagcgaatttaattttcttttatataattatgtaaagagatttatagtgccgaagagtatattattaatcaaatattctgttgatatattcaataactgtcaatttacagtacaccctaatcatacatatatagttattgaatttatagcaactaaaatgtatggttagggtgtatattaattatgaggtgaaaatcaatgattgttggctatgcaagagtatcatcgatcgatcaaaatttagaaaggcaacttgaaaatttaaagacgtttggtgctgaaaaaatatttacagaaaaacaatctgggaaatctattgaaaatagaccggtacttcaagaagcacttaactttgtgagaatgggcgatagatttgtagtagaatcgattgatcgtttaggtcgtaattatgatgaggtgattaacacagttaattatttaaaagacaaagaggttcaattgatgattactagcttacctatgatgaacgaagtcatcggcaatccattattagataaatttatgaaagatctaatcattcaaatattagcaatggtttcagaacaagaacgaaatgaaagtaaacgtagacaagcacaaggtattcaagttgcgaaagaaaaaggtgtgtataaaggacgccctttactatattcacctaatgcaaaggatcctcaaaaacgcattatttatcatcgagttgtagaaatgttagaagaaggcaaagccattagtaaaattgcaaaagaggttaatatcacaagacaaacggtttatagaattaaacatgataagggattatcttgataaatggaatgtcaatgcaaatgaaaggctctcacagtgtctcaaaacctatattgtattattgaattgatattttaatcattatacaggaaaaaagagtacgaattcgtactctttttctaaactaaaaattttactattgtttcttttattatagtagctattcagctttttttcagcattatttcttataaattttaatagttatcttttcaattgattaacttcttttattgctaattgtgaataatatctatttgagaaaaacatctgaataattaaaaaggcagcattaatcgtccaatatagccctaaagctgacgccgaggtgattgaaatatatacgatgaatataggtgaaataatcgccattatataacttataaaatgttgttctttaggcatattttccaaatttatcaaaggttgtacaatgtacaaaataccagcaattatagtaatccaaatatcaggctgtgttaagttaaaccaaagaaaatcagtatgttcagttaaaccaccacttgaaggccattttaatgaaacgtacaatccaaataaaataggcatttgtataagtaatggcaaacatcctagcattgtcttcatagggttcatattatattctctatatttattcatcatttcttgatttgcagttattttttcttcttgtgtatttgcattttttattctttcttgtatcttagttaattcaggctttacgatttccattttcttacgcatcaaatgcccatttttagattgagctaacataaaaggtaacataataattctaacgattaacacaattgaaatgattgctaatccataattattatcaaatatagaacctaaccaatgtaaaagatgatccataggcgctgcaaaagtattatagaaaaagccatttctattttctgatttcgaataatcacaagctgaaagcaaatttaagcttaataatagtagtgttattagcttttttctatgtatcaattattttccattcctttgttatatattctgtgtacatcttcttctatagatttaaagttatccaaagtcataaaagcctcattttctaaaatcctagaacttgctatattcaaagtgttttcataatttgctggtaatcgattttctaatggtaaagtatttaaccactcatctatttcattaaaaaattcatctttttgatacacaaagtcagcaactaaataatcaaagcattggcaatactgcttcaaatactgaatagctttattatcgtcatttttaacataatataatgcaagtttataataacaattcatacttaggtgtggatacaaataatccacattaaaagcttcatttatatgttgaagcttaggctctaaagattctattggaatagaatataagtcataagtaagcattaaagcaaaatcatacatgaaaatcatcaaagattgatacatgtctgtttgaattacatttttagcttttgagatattgtttttttgtaaataagctaaggtcagtgttgcactttcaccgattttcagatcaaaatcaggcgtattatctataactgatgaatagtctccttcaaacatatacattaacatttgatatccttgtgcatgtcttttcaagtatatagattctgagttgtcctctgtcgtttgaattatttcatgagctaattctgtagtctcttttacttgtgcttcattctcacaatataaaatgttatttgccaagatgcctaataatgaattgagaaacttaaattcattacaatgacttatataataatctcgcaccgtagatatatattcctcataactcgttctattgatcatcttagataatgatatagatacttttttaatttctacatctgtcatcgtaatattataattaagcaaatcatctactgagatattaaagacttttgctagttttggtagcattgtaatatcaggataaagtgttgcattttcccacttagaaatagttgtttttgttgtattaaggtatttagctagtgattcttgagtcattccacgtcttaaacgttcttgtttgattattttagatactttaatcattaataacacctcttatctttaatgttactagaaattttaaataaggtatatttcttatataacaatttaaagaaacaaagtttcctattaagaaacaataacgtgttaaaaaactatctcttttaaaagagatggtttaaaaattctatctcaataacgatccttctttaatttgcagttgttggagtaaccgcaaatcaagataagaagaaactcgttttcaactcgtttcaaataacgaaaaaagacattggaaagttccaatgtcttttttcgttatcccctcgagcaatcgagaagggagtccaactaagattaatacaacttcaacgaataccaatacgaatgtaatgacgtccgtaacacaatcaagattgctttttagtttgttcatcataagcaacactccttcccaaaaactggcgaaattaacgtgacccattgtccaacattcgcctaagctatcactagcgccggggggatcaaaactattatatcacttttttaaataaattagcccaaattcgtaaaactgaccgtaagtaataaaattcttgatacgtgcatttgttttatcattaataacagaaagtattctaaataactcctggttactaaaatcgtttttcaaaatagcaattatccctttatttattttagtccctttcgaacgctttgtagtaaagatataagaccttttgaaagcaggaactcgatttaaagtaaatattttactttctagtttttttggaatatttaccgaagagaaatcactggtaatcacattacaatttttaaaattaaaattcttaactttactaaatttacaattaataaaatgacagtttacaaaattagcacctaaaaaattagacttagataaattcgtattataaaaaacacaattaataaatataccaccacgaaaaacgctatgttttaaattacatcctaaaaaatcaacattcttaaaaaccctttttttaaagtgaaaataagttaaatttgaattaaaaaacctaacatttttaatatctttagctttaaaaaataatttatttccagactttttcgctgtgcgattaatattatttataactttatatttcacaaaatccctcctctttaattttgtgaaatactagaattaccatctaaagaaatacttgagtcttttccaagtgtaatgctagttcctgaactttttaattcggtattttctccaataaatgtcgaaccacttgattttacagtgctgcctgtaactaatacaggtgcacttaatacagaaccttgaatttcaactttcccattactatggtcaaatttaatccctctaagcgcttctaaaagtccaccgaatacttttatctcagcatcatttgcatttaaagcaataactccagtagcttctttaaaaatttcctcaaaatcataagatgacttagcaagtttcaattggtcttcaatttctggcttttcttttatcgctttattgaaaaaatctttaacttttgtttcagaaaaactcgagaagtagttaacagctaaggaagtcaaaatatcactaactattggatccatgtaaaattcccccttcaaaaatttaaattcactacaaaagaaagtaatgattataaataataatacaaaatttattccaattgctttattgacgttgagcctcggaacccttaacaatcccaaaacttgtcgaatggtcgacttaatagctcaagctatgccgacattcgtctgtaaatttagttaagggttcttctcaacgcacaataaattttatcggcataaatgcgtggtctattttttctttttcaaatcgtatttctttgcctcttctttagtttcatcacttatattaaataataaaaaataaactacgattccaattggaataccaaataatggcgtggtaaatgtacttgctataacaatcataagaatcaaccaaattaagtcttcccaaccccattttttatttaataaattatccaatatttgtttaatcgacataaaataaactactcctttcttaacaaactttatcacaagggttctgttgcaaagtaaaaaatcatgtaatatttataatgaaaaacgaaaaataattaatactaacaaaactctttactgttaaaacaatatttgcttttatagttttgtatagatgtgcatataattttaactttgcaacagaaccgtttaaagtaattacatacctaatttaagccatctttttttagaaagtagtaatattacaaaattaattataaatagaagtataaaaaatagtaaaatagttaatatatcgtgtgatggaattaaagctattttattgttcaatatatcttcaatagacatatacattgaattactagcttcaaaaggcgctattaaaccaaatctatttttattaatagctactaatataatagaacctatccagtaaacaatacttaatccaatactgattaatacgtttggagaaacaatacttatagttcctataattaaaatatactgtaaaattactaatgagaataaaattaatagcaaaaaataatgcgaaaaattagaaaagagaatagaaatcaaagttaaacctaaaacaataaataaaaaacattcaatgaacaatatagcaacttttttgtagaaaaaagaaaatatattttcgtctattaacttatagaataaaatgtttttatttgaatattctttgtttataaaataagaaataacaaatgagaataataaaaatccaaattcagttgtaacagtataagcactaaagaagtattcgctataacttaaatgtttaactttatctataccaataggtaaaaaataacctaaaagaaacaggaaacaaaataaaatacctaatattaatataattttattagaaagactttttctaaattctaatttcaaactaaacacctcactctataagttgatataatcatcaattaatttttctttagcttcatactcttctatttttttatttttgaaattaaaatatttacccggtaaattgcttagatccgataaattatgagtaatatttaatatagttttagaaggattattcataataaaatcatttaaaaaactataaatttcattaactgtttttttatctaaagcattcgtgacttcatctaaaacaattaatgaattatcttctaataaaaaacttaaaaatttaagtttttgtttctgaccgtcacttaaattttttataagtacatttaagggtatgttatcaatatttaatattttataaattttcttaaagtcatcattagaatcagtaaatctattacttaataaatctattaaaaaatttgtagttatatcattaggaatattagaaaaactagagattaaagttgtgttttgagaaatttttttaggaatattaccactattatttaatacaaaatctttagctaattgagatttaccaacaccattttttccgacaatatgattaatctgtccaggataaaaatttaaatcacaagtatttattaaattttttcctttgatttttaaaaagtaattttttatattcaataatttcaactcctatggataaaagtatttactccaatgtattagcgtgtttaaagcgataacaactcctacaaattggaaaattacaactaaccaatgattggttctgttgcaaaggtaaacataagaaaaaaggggagatttataatgaaaaaaggtaacagctttgtaattatatgtatattgatatgtatatttgttttggtttctatagtaatcaaatataatgctatacccgaatatattttacagttattagaattagtgctaggggtaatttgcataagcgtaagtttattatatatgaaggaaagaaaatttttaaaagccactttttctattatagtttctattgtaatcggtttagagcctttatgctatttcattgagttaatatttggtttaatttattagtgttaggagatttggttctgttgcagcgtataaaacgttacaacagtgttctggtactcatctacttgaatattgcatatataaacttcaaaatagtccactattattgtacttaccacgcaattatgccgagaaaatttattgaagttgagaagaacccttaactaaacttgcagacgaatgtcggcatagcgtgagctatcaagccgaccattcgacaagttttgggattgttaagggttccgaggctcaacgtcaataaagcaattatgtatttcatagattatcctccactttttgatttttgaaacgagttgaaaacgagtttctaaaaccctaaaattagtgcttttttataaacttcaaaaagaaagaaaccattgcacaaaacaaaataatacaaatcaaaataacacctaaaacaaaatcgtttccaatccactcaacaccaattttcaagataagaagaaactcgtttcactcgttttaaaaaacctaacttcgacctttatttttatttacttattcatcaattccaaattactttaaatcacgcccagttttctctttatacttatccttaatcatttctgatggcactgcaaaaacaaacatcaaaataaataatataattgccatgtgcggaatatcttctaaaaaataccaacgtaaatgccaatcaaacatcatattggcagatataactgcatactttagaaataataaagctacacaaataaaagctaatccatctaaaattttagttataaacttcaacgtcatgctcctttttgttctaggataacataattgctttattccaattgctttattgacgttgagcctcggaacccttaacaatcccaaaacttgtcgaatggtcggcttgatagctcacgctatgccgacattcgtctgcaagtttagttaagggttcttctcaacttcaataaattttctcggcataaatgcgtcatctacttttcattttttatcctacctatgtttgcaattccaacagttatcggacccattgccattaaccaactcatcataacgttaacctctcctaaaaaataataaccaagaaaagttaatacacctacaagtaataaaaaataattaaaagctaatgaatttcctaattttgattttttaggcatatcttttttcacgctccttattttttatgctaacaaaatatttaaagactaaataaaaattataatgtccttatttacaattttaagatactttttagaacatttagagatatttatagaataataaaaaagttaaaaagtaataggattaataggatttgggtaaaaaaatcaatcctatttataggattgacgtcgactgaagcctatgaaatcaacaaaaataatagtattcagacaatttaaagtggtcttgtaacaattgtaaatagtatgcaatattagagattatagtatcgatcaattcttatttaatattaaatacaagtattattatatcagcgtttatgataattttaaaaagacacttaatcaaggcgagcataagataatccttcagctatgctgaataccacttaaggtggtactggatttccttatgctcatgtaaaatcctatttgaaaatcctattttgtttgtaatatttcaaaaagtaaaacatacatcgttaaaaaataagttatgcttttcttcactttttactttaatttcttatttttatttctaaagcagtcattgttaatgaaaattataatgcccttatttgcaattttaagatacttttcagagtagttaaggtgctttatatatatttatttaacggctcttaaaacgtaaatataatctaaatttaaaagtcagaaaagcaaacctaaaatttttacttaaccagtatcgaattttttagacactgcccagttatatgcaaatttaaaaattgacataaaaaactgagcaaccataccagttaaacgttatagttcttgcagggataaaaaacataaaaaaacgctagcttttcgctaacgtttaaaaaattttatttttcttcttcaatttcatcaattatttgatgcttaatttcttgtttttcattttctgttaaatcaaaaagtggttctgttgcaaagttgaatttatagtataattttcacaaaaaggagtaataaaaatgaatattatagtctactgtggagctagcaaaggaaatcgagaagaatacgaaaacagtgcaattcaattaggcgaatggatagctaaaaataatcacactttaatttttggtggtggaaatgcagggctaatgggaacgttagcaaatactgtaatacataataacggtaaaacaattggtgtaatgcctacatttttacaacaaagagaattagcacatgataaattagatgaattaataatcgtggagagtatgtctgaaagaaaagaaactatgttaaacaaaggcgatgtatgtatagcactacctggaggtcctggaacactagaggaaataactgaggtcatttcatggacaagagttggccaaaataacaacccttgtatctttttcaatacaaatcactattattcacttatccaacagttttacgaccaaatggtttcaaaccaatttttaactcaagaagacagagataaaatattattctcaaattcttttgaagaaattgaagagtttataaaaaactataaagcaccaaaagtaagaacttattaatcaaagttgctttattccaattgctttattgacgttgagcctcggaactcttaacaatcccaaaacttgtcgagatatgcatataattttaactttgcaacagaaccttaattgttagcataatcgatgattatcagaagtttaagtcacagtaaaaggttaaaaggtgtatcaagggtttatagacccttgatacaccttttacattcatttttaattaccgaataatcgtctccaaaaactttttttagaatgaatttcgtttatcatatcttctttttgatcatctaatttatcgtctgttgtcaattcactattttgttgcttatactcgtttttatctttactcgcatcactaaactgagaaactattttttcttcttggttatctgaatcaatctttatggaatccgtattatcccttgtttcttgaacttcaaagtcctgtctcttattagcagaataattaagttgtctttcttcttctaactcagactccaacctttgtatttttttgttactttctaatgttaatacttgttggttttcaagtaattttgacctttcttgcaattctttcctataaaattctattgtctcttcatgacgcttttcttgtttttccagttgtttatttaaagtgtctatttgcttttcaagcagttcaattatttgaacattatgtttagattctttgtgtgaattatcctttttaactttttctgagttagtgatagtatcttcaaatccatatttttttttattgtgagttactctttgaattatcttttcaacatcaatatcatttttaataaatgaagtattatccttttttatcgtttctatgttcaacctttttatattattaaatatagtttgtttactaacttccaattctttgcttaattcttttacactcttcatatcatcaaccctttataaatactttatcaaccctttacaataaattttatcataaatgttgttatatcaatatctatctataattttaaaaaccctttacaaactcttgataataatggaatcaagagtttgtaaagggtttttaataaagatataatatcttttatgtgttcttctttagtgatataatgttgataatacgtttaagtcccaactactggtaatagttgggactcggtaataaaacgttacaatacgttagatatttaatttgatatatgtattatatacaacaatatcgacagtttgcaagtcaaaaagttatgtggatttgtaatgttttattacctctattcaaatttaattggaaagaggttcttattatgtctcgtaaaaatattaaaaatcaagctagtcaaaatttttatatgctacataaggctttatttgttaatgaaaaatataaaaaattaagtgatagtgccaaagtcacttatgcaattctcaatgatagagttagtttatcaattaaaaataattggattgatgataatggggatatatatttcatttttacaaatgaaagcctccaggatatattagataaaagtaaaaatacaattacaaaaataaaaaaagaacttcaagaagtaggattacttgaacaaatccgtacaggctttaatagacctaataaattatatttacatgatatagaaacaaatattagtgtagaaaaaaatattcaaaattcatctgaaacctatgataacatggagtcccaaaatttgggactccagaatcccaaattttgggactccagaatctcaaaatttgggactccagaatcccaaattttagaccctaatgatactgattatagtgatactaattatattaagactaataataatgatacgtatgatatgaatgataagagattaacttattctaataatcactcagatcattcaaatcactacccttcaaaatttaatgatgaagctttaaaatttcaattacttgaagaactaccacaaagtattcaaaattatttaaataacttttctgtagctgaaattaaacttattaaatctgtattattaaaagccaaaacatctttcaataattctattgatacatattatttattagaagatatggaaatagaaatacttcacgttctcaaacgttttaaagccatgcttattcaaaaaaatgaacctgttgaagcaatgcaagggtacttaatgaaatcatttaaatctgaatttgctgaaaagcatacgcttaataagcgtcgtgatcatttgccaatcacttctttatttaatcaataatacaacttaataaaccaacaatgattcaattagagagtatctttaaatagatgttctctttttttattaacaagtggttgctaaggcaaccacttagatcaaacgaaaggtaaaggaggggataacaaaataacatcaacacaatatcgaaacatagcatgctgctattaaagaagggagggacatttatgagtagtaagaaaaagattaaagttactttagcaatgtttaatgttcttttaacggcgatcgaactttatcttcaatggcaattgagtaaatctaaaaatgaacgatgattaagcaagtaggtgggactaaaacgtttctgttttagtcctatttttttctataaacggttactattcgtttaataatgtctcaaacatgtcgtataagaagaaaaataaaatgatcatttagcattgttttaactttaaaaaatataaaaacactaaccgtttttgtattctttagtaatcttttgtcgttataaaagcaacttaataaaaacgtttttgctatttattttgttaataatcggaaaagaaaggttgaatttttaattccaaaaaatcaaaatatagattcaattgatatatatcataaactaaaagtaagtcgttaatattcaagacatggcccgaatataattataaatttgaacttttttatctccaatcattttactaacaatgtttattttgaaaataaacataagcacgtaaagtaaaaagtgaataaaaaaatagccacttttgtcttcaaacatattttgtttttggaaatattacaaacatgagagtctttttaaagagtatttgacatgagcataaggaaatctagtaccaccttcgttggtattcagcatagctgaaagatttaccttttattcgttctactcaattgttcaccataaatagcttaaaaattttatataaaggtgattataagcattcttatacattgaactagagggtgtaatataatactttattacagactctttacaattgttacaagaccattttgaattgtctgaagactcctttttttgttgatttcatagacttcagtcgtcgtcgagactcttaagagtcttaattttttcaaccaaagactcttaagactcctacttttagtattaatatcaaaaataaaatcactcaaaagtaatctaagcaattcattcatttgttttactttttgaatttgatgaaataccttttgatcaatatcgaattcaatattgatcacattatttgtttttaagttcaaagaaaaaaggaaagaataaaacaatttctatacttttctctgctcaatttgattaaaaagtgattcgaaatgaagcttattttagctttttattaatttgaaaatttataaaaaacaataaaatacgtaataagattcattgaatgctcatactccaaattattattttttgactttttatgattccataaatatctaaaatcataaaaatgaacgacatatagaagatacttttgaagaaatattgatgagtatatttatcacaagtaacttgaaattgttttcaattcttgaatttttcgtagctcttttattccaaaattataaatataatgttttgatttactaccatatagaaatagctcaaagcaatttgtaagtcaaaatcatattcgatttttaaatttagttcacatttgcgttttatgagtctttaaattaaaaatgtataaagaacacctaaacactttgaaaagtattttaaaattgtaaatagggtatttaaaatttgataactcctatgatattttttattaaaaaggagagtttctgatgattgattttttaaaaaataattcaaatactttttcacaacctatgattttggcatctattctttttgtttttgcaggtcctttaggggtatttttaggagtggttattggatttttacttggtagaaagttagataaaaatggaaattagacacgcatttatactaaaaaaatttattgtgcgttgagaagaacccttaactaaacttgtagacgaatgtcggcatagcgtgagctattaaattgattattcgacaagtttggggattgttaagggttcgaggctcaacgtcaataaagcaattggaataaataaatcttagttgattcctgggatattccattcgatttctattaggtttctttcgcttccgtgactttctgattttatttctttgaaaattatttctgctattctaccgtgattatttattaatattgctaaatcttttatagtgaaatctctaatccagctactagtatctagtctttttattatattttcaggattttttaaattttcttgtaattcataataaatatcgttgtctttgtaattttttattctagctatttttattgtacctgcttccataattcttgctatttcgttagaagcaacttgcaatctcattttgaattcgtatgatagttctccaattgtaaactctccgttgttattcgaagggtctacttttttagttcctctttcgctcttatctttgtagtataattctttgcttgcatgatttttttgatttaacgctgtgaataagtttttgttatttggatttttttcggttttttttagtattagtttttctctttcttcttgtagtatagaagtattagtactaccttttcttataaaggatagaccctcgaataaagatgatttttttatttttagttctttttttaattcgtaaggtgtttctaaattattagaatttatagctatgtatcctacttttttatcgttatattctatttgaccggtttctatttttggtctcggtttgacatatatgtcaataatattttgataatgtccatcgtcgaacatttctttttttaatcctattatttttttatcatcacttactccaaagattataaatttattttcgttataagaatatatactatttaacatagcaaggatatctttaataaattcgccttttttttcttttgtatactacatctgttcatcatcgtaaagtaatacgacaaataaattgtaatataacacttatcacaatcattcaactaaacctgttacgagttaaagcttgttgaactcaaaaaagcgccggtactaaagacctgcgcttttttggttctgtttagaggctcaacgtcaataaagcaattagaataaagcaactttgattaataagttcttattttttaataacataaaacccctctttttattacattaagtaacttttgatttattaaattaattttttatttgggatttcacacttacaatattgaaagactataaattatatttaaatgatatattaataataaagttaatatataaatgaaagtgagattcaattatgattaacaatattgtacaaacccaaaatttaacaaaaaagttttcagatagttattcagtagataatctatcactaaatattggttcgaaagaaatatatggatttttaggtccaaatggtgctggtaaaagtactacaatgaaaatgctactaggtctcatgcaaccaactaaaggtaatattaaaatattcaatcaagatatttcaaaaaatagagatacgatattaatgcatgtcggggcattaattgaagaaccttcttattataaaaatttaactggtttagaaaatttgcaagttattcaaagattattaaacttaccttctagaaatgttaaagaagctctgaaaattgtacgtttgactgaacacaaggataaattagtcaaaaattattcattaggtatgaagcaaaggttaggtattgctttagctatagtaaaatttccaaaactattgatattagatgaacctactaatggcttagatccttctggtatacaagaaattagagaattaataaaatcttttccaaaaacttacggaatgactgtacttatatctagtcatttattatctgaaattgaacatatggctaatacagtaggtatcatcaatagagggaaactattgtttgaaggaaagttaacagaattagaagaacagaacaaaatattgataaatactaacaataacagggagagtataaacttgctgaaatcaaaaggatataagctagaaaataatgaaaaacctctcctattagatacaactcaaaaagatatatctacagccgttaaattgttagttaataatcagttcgaaatttaccaagtacaatcagttcagaaaagtttagaagaaaaatttatagaaataactaatgatggaaaggaatatttataaatgttaaaagctataaatttagaatttttcaaaatgcggagaagaaaatttatccttccaatactactgattacctttgttggtatattgtggttttgtgctatagcaattaaagagttaaatattactgatacaaagtatggtatttatatgatcatttctaatattctaactatcgacagtgtgatttatccaatattaataggtattttatgctcaagacttgcagatatagaacatcaaggaaaaacctttcagttattaaatactagtaaacaaagtgttttcaatttgtttactagtaaagttggtgtttcgcttattattttatttgtaattgatattatacaattaatgaccatcttactaattgctaattcacataatatcagtttaaaactagaaatcatttcaaaattcatgctaagttttataattgctagtttcttcttaatattaattcatatggcactttctttcttttttgaaaaacaatcagtcagcattgtatcagcattagtaggaagttttttaggattagtaacaggagggatgttgccttcatatattaaaatatttttgccttggcaatattattcattactaaatccagttcataaaaagatggttcacaaaggatatgaatattcaaataatgactattattttatttatatttttatttctattctattaatagtaattctattctttattattaaagcattaataaaaaggagggacttaaattgatttctttattaagcatagaattacgcaaactacaaaataattatattttaatcttcttattagtttttaatatattaagcgtatctataggaagtatgatattttattttaatcaaagcgcttttcctaattcaaataatcgagatttaatattgtgggggcaagaaactttatatacttcacaacttttctttcccatactgataggtgttttatgttcaataagttggcaatttgaggaatctaataataattggatgagattgaaaactatacctttaaaagaaagtaagatagttttatcaaaattttcatctcttttcttacttactttactaaatcaaattatattttttgtattattttgtatctcagcatcaatagtaaatgtatccttggaagaattacttaaatttatatactgggactttataggctggataggtacagcatctattgttgctatccaattatatttgtcagttgcgactagaaatttcactttctcaattttaatatcaactattggcggtatactaggtcttctaacattgtttattagcaattttatttttaaaatatttccttattcacaaattacagttggtgtgagagccagatctttgatgaacttcactttttcagaaatgttactttttcttataataaatgcagcttatataacagtttttttgacacttgctactataaagcttaaaaaaagagaggtttaatttaaaatgaaaagaaaagactacttattttttgtaattgcacttttacctttaattagtttgttattacagttaatgaaaatttcacttatccataattatcaaagcttattctctatagttaatatcatctgcatactttttactattgcttattcaattattttagttattaatagcaagaaaaagaataatttacagaaaacgattcttattttgtctattatctatatattaactttaatttttatctcttttggagtaataattaatatgtttaattaaaataattttaatagcaaaatactttcaaaattttttacacataaaaagccacgataaatttatcgggttctgttgcaaagttaaaattatatgcacatctatacaaaactataaaagcaaatattgttttaacagtaaagagttttgttagtattaattatttttcagtacaaatattacatgatttttaactcaagaagacagagataaaatattattctcaaattctttcgaagaaattgaagagtttataaaaaactataaaacaccaaaagtaagaacttattaatcaaagttgctttattccaattgctttattgacgttgagcctcggaacccttaacaatcccaaaaaaactcgtttcaaaaagccccctttttcgaaaaagggggctaaaaaaataattaataatttaagattgttttctttttctattttgaatccaatatgcactacctaataaaccaataggaatacctactaatggagttaaaatattgctaagtataaatgtaacaacaactacaatacttacgttcttaaaatttaattctaaatttttaagatcctcccaagattgtttaaatatattctttacagacatagtaaaacctcctctacactcaccttaattagaacactttaaaattttaaaaatatatacaactatagttctaacaaccattttttcggttctattgcaaagttaaaaatcatgtaatatttatactgaaaaacgaaaaatatttaatactaacaaaactctttactgttaaaataatatttgcttttatagttttgtatagatgtgcatataattttaactttgcaacagaaccaataaagcaatatggaacaaggttgttacatgcagatcaaatgctaaaagtaacaaccttgtttcttttaatatctgcttattatgagagtatagagttataaagcttaaggagaaattttatgatatctgagagattaaagttagcaagaaaaaattctaatttaactcaaggtgaagttgctaaaaaattatatgtcactaggcaaacaatttctcgttgggaacaaggtaaaaccttaccaaatatttttgctattgaaaaattgagcgatatttatcaagtgtctttagatgagttgataaaagatactttattagaaaaaaaggaggtaaaaaatatgaaagatgttaattattttgcattatttggagcaattatatttaatctctttttattttctatgggtttgatatttagtgttggaatgttgattttgatatttggtatttctttagtaatgatattgagtccgatattgtttggtatttttgttgcttctggtattcaagagtttagctttattcaattaggcttaacgattttctttttaattattggcatattttcactacctttgattaaaaaagtttctgtaatgctgttaggctttttaagaggatatttgaagtataatcataaatcaattttttattagattagggttttgattttggtttttagaaacgagttgaaaacgagtttcttcttgtcttgataagtcttgtgataaagtttgcttaaaaggagtgtcacaagtgaagaaaacagaacgtaatttattttctatttttttatctttagggagtctttttgcgatatttagtggtttttttattttagggattggaatgttgattggtggagcgacgttgttgactaaaagtatttcagaagaataaaagtgatgccacatttatgccgagaaaatttattgaagttgagaagaacccttaactaaacttggagacgaatggtcggcatagcgtgagccattaagccgaccattcgacaagttttgggatgttaagggttccgaggctcaacgtcaataaagcaattggaataaagcaatattgctttataatttaatctgagtagaggggagttttttatgaataataattatgtttccatcagttttttaaatgagattccgttgtttgattacgaattttttttgataaatcatgaatttgagcaatggaatcaagagtatgaggcttttaattttgagtttaatggagtcgaatttaaaagtagattggctaaaaaaactcctaaaaaagttggttattttgtcgcgttttggcgaaagaatgaaattaataaaaatagaccttttaattttaacgaatcaaaagataagttaattattaatattttagatggatctaaaaaaggtcaatttgtttttcctaaagatttattggttaaaaaaggaattattagttctgaaaagcataaaggaaaaatggctattcgtgtttatcctagttgggaacagaatttgaacaaaacagctgttagtactcaaaaatggcaaattccgtattttttagattttagtaagggatttgatgaggaaaaaatcaaggaattatatttaagttgatttggttttagaaacgagtgaaactcgtttctaaaaccacctctttttgacattaacgtaacgtaataccttacaatgaataaaaataaaaaaagaggtggaaacaatggaattttatcaaatgccaatgtttaataaagtgctagttcaagatattgaaaaagcggagaaatggtatgaaaaaacacttggttttaaaagtgtttttaaatttagaaatgataaaaatgaagtgctaatgaatcatttaagactagagaaatatcaagacttaatgctaatttctcaaacagattttgaagttggaaactcaatatacttaaatatcttagtaaaagatatcgaaaaaaaatcacaaaacatttcacaaaaattcatagtaagtcaattagaagaacaaccatggaacgctaaagaaatgacaataaaagatccagatggacacttaatcacacttactcaatcaaatattagcgatactgattttgaaaaattaatgaaaaaaacttctaaagattattagatagcaaatctatattgctttattccaattgctttattgacgttgagcctcggaacccttaacaatcccaaaacttgtcgaatgctcggcttaatagctcacgctatgccgacattcgtctgcaagtttagttaagggttcttctcaacttcaataaattttctcagcataaatgtgtcatttaatattttttagaccaaccaataagtaaaattaaagtactcaaaaaaataacaaacgaagaaaataaagaagcaaccaatgtataattatcaatcaaataagtaattacaaaagctaaagacccaagtaaaaaactaattaaaaaatgaatcactttaataaataaacaactccttttaaaatttttatcacagaagaaattcaaaattttaaatatccctatttgcaattttaagatactttttagaacatttagagatatttatataataataaacagattaaaaagtaataggaaaaataggatttggctaaaaaaatcaatcctatttataggattgacatcgaagaataataagttttttaggcattttactaaaatcaaggttgttattgttactttttgatgtttatttagacataaaatcacttatcagaagtgcatatgaaatgaccgacatctttgtaaacatcatgactacagcagcaacgataaataggtggctagtcccccctaactactggcatagttaggggggactagcacgacatctttgttaattgtattgtaacttcatagtagataagaatgcaaaattaaaaaataataatgattgggaagagataatatgaagatcctcttaattaaagatgatatatctatgggaaactaacctcaaaaatatcaaacacattgtcctaaaaatagtatttgaagtgatggaatacttgtcagttacttcttatgacattttattaatggattagaatttatctaagtgtaggtgacttgaaattattaaagaaatacagatggaaatataaatattcctattattacgttaaccgctaaatcacagattactgataaagtttcaggtttaaacataggtgtggatgattgtttaataaaaccatttgaatttgaagaattagaagtacggatattggaaaacgttatacatttttctaggacacaaactatgcaacaaagcattaaacaagatcaaatgttttagagaactattaaacaacatattgcaaaattttgaataaatttgatagaagatttagataaaatgttatattttctaaaagataaagggataagtgaaaaataagtactttacacctattatatttacattaaattgacaacaaagttttgtgggtatggtataattaggattgtattgcaatgaattattttatacaattaagtgggttgcaagttactttttgaaatttattgtataaagtttcagtgcgactttatataaagaagaaaagggagtgttcttttgaaaaaaacgcgaaaaaaattagatttcttaccgaataaattaaataaatattcgataagaaaattcacagtaggcacagcatcaattttagtaagtgcaacattaatctttggggcaggacatgatgtagctaaagcagcagaagaagatgctagtacagaacaagcatcaacagaagaaaaagtaacaagtgaaggtacaacaacagaacagccttcaacagaagagaaggcaactgaagaaagcacaacagaacaaccttcaacagaagagaaggcaactgaagaaagcacaacagaacaaccttcaacagaagagaaggcaagtaaagaaagtacaacagaacaaccttcaacagaagagaaggcaagtaaagaaagcacaacagaacagccttcaacagaagaaaaagcaacaagtgaaggtacaacagaacaaccttcagcagaagagaaggcaagtaaagaaagcacaacagaacaaccttcaacagaagagaaggcaagtaaagaaagtacaacagaacaaccttcaacagaagagaaggcaactgaagaaagcacaacagaacaaccttcaacagaagagaaggcaagtaaagaaagtacaacagaacaaccttcaacagaagagaaggcaagtaaagaaagcacaacagaacagccttcaacagaagaaaaagcaacaagtgaaggtacaacagaacaaccttcagcagaagagaaggcaagtaaagaaagcacaacagaacaaccttcaacagaagaaaaagcaacaagtgaaggtacaacaacagaacaaccttcagcagaagagaaggcaagtaaagaaagtacaacagaacaaccctcaacagaagaagcgactaaagaaactacaacaaatcaaccaatttcagaaaaagaaactgtaaatgaagttaagaatgtagcaaatgaaacaggagtatctgaggacgaaattttagctgctttaaataaacaaggtgttaataaagctgatgaaaatgaaattttagctgctttaattaaagaaaaatcggcaactaatgatcaatattcaactccagtagttgctaatacaacaaacacatcttctaaaacgaagacaacttctaacacacctgttagaaacttgttacgtaatagagcaatggtaatggatcgtgctaatacgtcagatttacaagaatcagcagaaaatagtgctatatactcaccaggtgatgctactaaaaaacaaacttatagtggtaaagcatgggtctatagaaatggtaatcactcagcttcttctcaaaaagatgcagtaccattgccaggagttaatgtctacttacaatgggtaaacggaaaaggttttgtatctccagtgtattacactactacaaatccagacggttcatttgcatttgacttgtcaaaaccagtcacagatgagattgacaatactcatgaatttaaattagcaggagactctaaattcgctataagaacttgggttaaaaatccagatccatctaaatacgatattgttaaacacggtgaccaaatgtatggttatcatgatcgtttaactagaaaaaatgaatcttgggactttacagcaggggttaatagaattgttaactcacaagttgtacttcaagaaaaacataacaatgttgattggttactaaaaccagaaaatgaacgtacaacatctggtacttcaaatggccaatttgaaaatacaggtgcttacggtacaattcgcggtaacgtatggtatgaaaacggggattctaatggttctgatgcaagacgttggggcaaagatacttgggatgttaatgctactaatacaaaagtcgcagcatcatatgttaatgacgaagtaactagactatttgatacttggaaaaatgaacatagtggttatacattagatgattttaaagcggtacaagcacaaattatcgctgattatgaagcaaaaaatggtgtgggttcacacattgctgaaactgttgtagcaaatgtagattctaacggtaattattacattccgttcaaaggtatttatggtattagtgcttataaacaaaattcaggtgcaagcatttctaaaactatctcagatgaagaatatggtaaagttgtagctgataaagatgtttcacataataacttaatggcttggaatggaacaattggacaaaaacacagacatatcaattctgattacgtatatgttacgccactagttgacgactatgctatttggagtaataatttccaaaccaacatgtttgaaggattaagtgacgacttgttaccaattggaccaagtgctcaaagctcatataacacatcaggtgtggattttgcacttttagcaccacaaccaatgcacgatattacgaattatgattcaacagataaattagctagaccaggtgatactgcagaatctagaacaggtggcttattaccaaatcgtgaatatcaagtgcaatggttcaaaaatggcgaaaaattcggagatccagttactgtaacttctgcagaagatggaacagtaggttcagtacctttaacagtaccagaagatgcaaaagtatcagacgtattctcatctgcagtattcaaacaaggtgtttctacagaatcattaactacagcattagctattgattcattctctattacagaccaacaaccagataatgaagtgtatgaaccaacaacagacgaagtcacaaaagattacggaacaccaacaactgaggatgatgtaacaggagcagtaacaattccagattatccatcagaaaaaggaacaccaacaatcacagttgatgatccaagtacattaccagacggtaatacaccaggcaaagttgaatttatagtataattttaacaaaaaggagtcttctgtatgaactatttcagatataaacaatttaacaaggatgttatcactgtagccgttggctactatctaagatatgcattgagttatcgtgatatatctgaaatattaagggaacgtggtgtaaacgttcatcattcaacggtctaccgttgggttcaagaatatgccccaattttgtatcaaatttggaagaaaaagcataaaaaagcttattacaaatggcgtattgatgagacgtacatcaaaataaaaggaaaatggagctatttatatcgtgccattgatgcagagggacatacattagatatttggttgcgtaagcaacgagataatcattcagcatatgcgtttatcaaacgtctcattaaacaatttggtaaacctcaaaaggtaattacagatcaggcaccttcaacgaaggtagcaatggctaaagtaattaaaggttttaaacttaaacctgactgtcattgtacatcgaaatatctgaataacctcattgagcaagatcaccgtcatattaaagtaagaaagacaaggtatcaaagtatcaatacagcaaagaatactttaaaaggtattgaatgtatttacgctctatataaaaagaaccgcaggtctcttcagatctacggattttcgccatgccacgaaattagcatcatgctagcaagttaagcgaacactgacatgataaattagtggttagctatattttttnnnnnnnnnnnnnnnnnnnnnnnnnnnnnnnnnnnnnnnnnnnnnnnnnnnnnnnnnnnnnnnnnnnnnnnnnnnnnnnnnnnnnnnnnnnnnnnnnnnngatcaaactctccataaaaatttatgatgtttgattagctcataatactaaatagtgtttgtaacatttaagttactttattggaattaacgttgacatattgtcattcagttttcaatgttcatttgatattaattaaatggtggagactagcgggatcgaaccgctgacctcctgcgtgcaaagcaggcgctctcccagctgagctaagcccccatatttttaaagaagtcgggaagacaggattcgaacctgcgaccccttggtcccaaaccaagtgctctaccaagctgagctacttcccgtatattaaattaataattttaaatggcgcgcccgataggagtcgaacccataacctcttgatccgtagtcaaacgctctatccagttgagctacgggcgctatatttaaattggtgccgaggaccggaatcgaaccggtacggtgatctctcaccgcaggattttaagtcctgtgcgtctgccagttccgccaccccggcaaatataatggagcggaagacgggattcgaacccgcgacccccaccttggcaaggtggtgttctaccactgaactacttccgcatattaaaataaatcgtatgagccatagaggattcgaacctctgaccctctgattaaaagtcagatgctctaccaactgagctaatggctcaaagatggtgccggccagaggacttgaacccccaacctactgattacaagtcagttgctctaccaattgagctaggccggctaaaaagtaaatggtggagaatgacgggttcgaaccgccgaccctctgcttgtaaggcagatgctctcccagctgagctaattctcctatcaagtatgcctggcaacgtcctactctagcggaacgtcagtccaactaccatcggcgctaaggagcttaacttctgtgttcggcatgggaacaggtgtgacctccttgccattgtcaccagacaataacttactcaaataattatattactaattaattaatttttcaatagttaattttacactttattaaaattctttttacaagtgttttacaaaattaactttcgtttttgacgacttttatatcttataataatcaaagtctaatgtcaacaattttttaaaggttttttaaattaatttttaaaaaggatttaatttttgaacactcatagtatactaccacatcatatatataatatctagtcttttttaattaattttcctttttatttttcataaaaaaacgttgcttaccttagcaagcaacgcttttaatttatattaatcttatttttgtctcatgtaagggaataataatacatctctaatagatggtgaatcagttaacaacataactaaacgatcaattccaattcctagtccgcctgttggtggcataccatattcaagcgcttcaatgtaatcttcatccatttcatgagcttcatcgttaccttgttctttctcaacaagttgtgcttcaaaacgttcacgttgatcgattggatcatttaattctgtgaaggcatttgcatgttctctacctacaataaacaactcaaaacgatcagtaaatcttggatcttctggatttttcttagcaagtggagaaatttcaattggatgtccataaataaatgtaggttgaattaatgtttcttcaactttttgttcaaagaattcatttaaaatatgtccatatctcatgttttctgtaatttcaataccatgtgctttagctaatgctttagcttcttcatctgttttcacattatagaagtttacacctgtagcctctttaacagcgtctacaatatgaagtcgtttccaatctgattctaagtcgatttcttcgccattatattgcacttttgctgaacctaatacagtttgtgcaatatatctaaccatagattctgttaaatccataatatcatgataatcggcatatgcttcatataactctatcatagtaaactcaggattatggcgtgttgatacaccttcattacggaatacacgaccaatttcataaactttttctaatccgcctacaattaatcgttttaaatgtaactctatcgcaatgcgcatatataacgttgcatctagtgcattatgatgtgtaacaaatggtcgagctgcagcaccaccagcgatttgatgcatcattggcgtttctacttctaaatagcctctttgatttaaataatttctcatttcttggatgattttactacggttaataaatgtacgagtactatcttggttagtaattaaatctagataacgttggcgatatctttgctcaatatcttgtaaaccatgaaatttatcaggtaatggtcttaaagctttagataataatgtaaatgattttgcttttactgataattcgccagtatttgttttaaacatgacaccttcaatacctacaatgtcacctaaatccgttgttttccaaaggttatcaaaaggttcttcgccaatttgatctttacgtacataaatttgaatttgacctgttaaatcttgtacatgcgcaaatcctgctttacctttaccacgttttgtcattaaacgccctgcaatagaaacatgactttcatcttctttttcatgtaattcttctttagaaaaatgatcccatttttcttttaattcacttgcagtagctgtacgttcaaagcgtttaccaaacgggtcaattcctaaatcaataagttcttgtaatttttgtcgacgaacctgcatttggtcattcatttcttctgacattactctctctcctttaaacttcctgttttactattaatggatgttatgtacttattaaaaatattgtaaaatattttccattcattattttatacatagtcacatagttaaattcttaaaatatatttatattttaagaatttaagcacttatcttagcacttagtctttatatttcttaatcgtatcatctggaaaaactaaatcatgaattttctgatttaatcgtggattctgtttgtccgatgcaatatcgttcaacggtataagtacaaaagcacgttcttgcattcgtgggtgaggtacacttaaattgtctgtttcaataatatcatcactatataataagatatctatatctaatgttctaggaccccaacgtatttctcttactcgatgcagttgttgttcaatgtctaaacaatgcttaagcaattgttgaggtgacaactctgtttcaatctctaaacacaaattcaagaaattaggctggtcagtatagccaatcggtgcagtttcatatatcgatgattgttttgttacctttatacccttaatgtttccaattaaatcaattgccttaagaagttgttgttttctatcaccaatattacttcctaaacctaaatatgcttgtaccattaacgattctccctcactatttcaatacccacaccatcgtaatgaccaggtataggtggattttctttagtgattctgactttcgtttccattacacgattatagtgtgaatttatacgttttgcaatacgttcagctagatgctcgattaaattgcaaggtgaaccttcaacaatatcttttacatcttcaaatacttcaccataatgcacagtatctttaacattatctgtctgccccgcttttgataagtctacttttaacgttacgtctactaaaaaaatttgacctatttcattctcagctgtgagtgcaccatgatatccataaaacttcatccctttaagaaagatcatgtcgttcattttcattctccttcaaaaaatctataccttgagctaaacgtacatttaattgaacattatgtacgcgaactgcttttatgcctttcattataccataggcagtggtagcagcagtggcctcatctctttcttttggtgtcgtatcagtagaaatcatctctctaataaaacgtttacgacttgtcgctaataaaacaggatactctgtagcaactaattcatctaatcgagccattacttcattttcttcttttctacttttagcaaatccaattccaggatctaaccatattttatgttttggaattcctgccatttctgctttatttgcttgctttataagtgttaatagcatttcttctacaactggttggtcacggtgtccatctccattatgcattaacacaatttccgcttcatatttagcaactacatctaaaatatgaggatcatataatccagcccattgatcattaatcattgtggcccctaatcttagacaagcttcagcaacttcactgcgatatgtatcaatggaaatttgtacatttagtttcaccaattcttctacaactggcacgacacgttgcatttcttcttctaaagacacttctgtatgcccaggtcttgttgatacgcctcctacatcaataatatctacgccttcatcaatcatttctttagcacgtgtaactgcgttatcaattgaattatactgaccaccatctgaaaatgaatcaggcgttacatttaagattcccataatttttgttttacccactatcaatcatcctttgttttttaaaataaatatgtatactcacatgatacactcatttagtctatatttcagtattgttaactgagagaacctttatactaaaaagtaaaatagctggcttcgccttttacgaaaccagccatttcttatttaaaacatgatattcaaatatcaacttatatcatcattagtcatcgaatgaatataatggtgtagataagtaacgttcaccattacttggtaatactgttacaactgttttacctttacctaactcttttgctttttcgattgctgcataaattgctgcgcctgaagaaatacctgctaagataccttcttctttagccacacgacgtgatgtttccattgcagtttcattaccaactttaatgatactatcataaatattagtatttaaagtatcaggtacaaagccagcacctaaaccttgtaatttatgtggaccaggttctccaccacttaatacaggagatccttctggttcaattgctacaatttcaacgttaggatatttctcttttaagactttacctacaccagatagtgtaccgccagtaccaacacctgctaagaaagcatcaatttgtttgccttcaaattgttcaactaattcaggaccagttgttaatgcatgtacttcagggttagctggattttcaaattgttgaggttcgaaataaccatgttcttctttcaattctttagctttcttaatagcacctttcattgcttcagatccaggtgttaacactaattccgcaccatatgcttttaataagttgcgacgttcagaactcattgtttcaggcatagtaaatactgctttataacctttagctgcacaaacaaatgctaaaccaataccagtattaccacttgttggttctacaattgtatcaccaggtttaattttgccttctttttcagctttttcaatcattgctaaagcaatacggtcttttacagagccacctggattttgatactctaattttacatatacatctgccgcatcttcatctactacgtttcttaattttactaccggtgtgttgccaataatttgtgtaatattttctacaggtttttgtgccatcgaaaaaacgctcctttaactttctaatttaaaacttagtctttctatcggatataactatattctatcagaattttctaaaaagacaaatatatttctttaaatatgatgtaatattttactttcattagttacatttagtttttcccataaaaaaagagcaataaacatacgcttattgctcatcaacattctactattgttttattgtatcaagtagttcttgaagttcgccttcagaataatgatatttatttccacagaaatgacacacggcctcagcaccatgatcttctttaatcatatcttcaatttctgcttcacctaaacctttaattgcatttaggaatttttcatgactacaattacattcaaattgtgcatccattgtttccaaaatttgtacattctcttcacctaaaatttcatttaagataccttctggcgttaagccttgttcaatcaatttagaaacgggctgcatttggttaattgcattttctaatttagtaatagtttcttctttcgcacctggcatgacttgtataataaatccacccgctgccttaatagaattatcagggttaacaagcacccctaatcctactgatgacggtgtttgttcacttgtcgcaaaataataagtgaaatcttctccaagttcaccagaaacgattggacttgctcctgagaaataatctttcattcctacatccttaacgacttgaattgcaccctcagtacctactgctcgtcttacatccaatttaccttgatcattaagtggaaaatgggtttgaggatggtccacatatgcccgtacatttccttgtgcatctgcatcagcaataattcgaccaattgggcccttaccatctactgtgacagtaagcttttgatctccttttaacattgcccccattaataacgttgctgtcattgttctccccatcgctgctgaagctgtaggccatgtatagtgacgtgtttggccttcttgaactgattcagttgttaatgcagcatacgcacgtacttctccatcaaaagccaaagatttaacaatataatcatgtgtcattactctaatctctcctttatgttattttatttcgtttgtttcatttattttaaaatctaatattaaatcctttattaagaatatctattttacactgcttatttaagaatatgaagtaacttgctctagcgtatataatgctcctatatcatattaaaaactctttcgattaaggttatttaacccgagtcgaaagagtttttatgactaactatgattctctatgatttgaatctgttggatgctctatatttggagattgttcataacctgtttcatctctatcatttcgttgtgaatgattttgagattgattacggtctgaacgatgattgtttctatcatgatcgattctgtcaccttttttgcggtcttctgcttcatctttacgaccttcttcaagttgttcttcacgaatgtcatcataagatttaccatatttaccgtttgagaactcagaatcatctctatcttcatcttttaccactttagctgcatcataatccactgttggtaaaacaccatcatagaataatgaacgtatttgttctgctactagtgtttcttcagttaataatgttttagcaatcagtttcaattgagattcatgttctaataaaatttgtttacaacgttcatattgttctttaataatacgttgaacttctttatcaatttcataagcaatttggcctgaatagttaggttcaccttgcatatctttacctaagaagacttggccgccaccgcttgtagagaattgtaaaggtcctaatttcttactcataccatattcagtgaccattgaacgtgcaatttgtgttgctctttcaaagtcgtttgaagcaccagttgatacttcatggaagttaatatcttcagatacacgaccacctaaaagaccacaaattttatctaacaattctggttctgtcattaagaagcggtcttgtttaggtaacatcattgcgtaaccacctgcttgtccacgaggcacaatcgttactttgtgtacaacttctgcttcatcaagtaccataccaatgactgtatgacctgcttcatgatgtgctacaatattacgttctttatcagaaataacacgagattttttcgctggacccgcaatcactcggtctgttgcttcttcaatatcacgcatatcaattttatttttaccttcacgtgcggcaattaatgatgcttcgttcaataggttttctaaatcagcaccagagaaaccaggcgttctttgagaaatagcttttaaatcgacagtttcatcaagtggtttgtttttagcatggacatgaagaatcgcttcacggcctttaacatctggacgacctacttgaatttgtctatcaaaacgaccaggacgtaataatgcagggtctaaaatgtcaggacggtttgttgctgcaatcataatgataccttcattctcaccgaaaccatccatttcaactaataattggttaagcgtttgttcacgttcatcgtgcccgccaccaacacctgcaccacgttgacgaccaacagcatcaatttcgtctatgaaaataatacaaggtgcatttttcttagcattttcaaataaatcacgtactcgacttgcaccaacacctacaaacatttcaacaaaatcagaaccactgattgagaagaatggcgctccagcttcacctgcaacggcacgtgctaataatgttttacctgtacctggtgggcctacaagtaagacacctttagggattcttgaacccattttcttaaatttcttattatcttttaagaaatctacaatttcaattaactcttgtttttcttcgtctgccccagcaacatctgagaagcgaacacgacgtttttggttgtcgtacatttttgctttggatttaccaaagttcatcatacgacctccaccgccgccaccttgtgcttggctaaggaagaatataaataagaaagcaataattaatacaggaataagcgttgtcaacatactgacaaagacactttgtttttcttcttctttaactgtaaaatctaatcctttttggctacgagcttcatttgttatttgttgtaaatctttttcgttattgtataaaatcgttgaagaataatcttcatcatttttagttttaccacttaccaagtacacattttgttcaggttggatttctaaagttttaagatcacctttatccaatttctctacaaactgtgaataggaaagttgtttcggtgtatttccattaccattgatatatgagaaaacaccgaatataataacgccaataattgcgataactagcacattgcgaaaagctttctgcatgcgtcatttcctcctatttctataataaagctaacaaagattgtaacataatctagcttataaaggctagtatttcaacttttgtagcgcttttctaattctagttaattattttatattcatcatttactcattctttatttctaactttacatatctatgtatagtcgtttcataaaatgacaattttgaatataaaatgagtctacactaatttatatcgttagtatagttattatatttaaaaatctatttaatgtatttgctaatacattataagattttatttattataaatttccggttttaatgtaccaatgtaaggaagatttcgataatgctcagcataatctaaaccatatcctactacaaactcatcaggtatttttttgccaacgtattttgcttcaatatccgctttacgacgattcggtttatctaacaatgtaacgatttctaatgagttaactttgcgtgatcgtagtaattcagtaattgattttaaagttgtacctgtttctaaaatatcttcaataatgagtacatctttgttttcaatagaagcacttaaatcttttaaaatttgtacttctcctgttgattctgtaccaccgtgataacttgaaacatccataaaatcaattgctaaatgtgtatcaatacgtttgattaaatctgccataaacataactgaacctttaaggataccaacacaaacaagtggtttatctttgtaatctctcgttaattgttcacctaaatgtttacaaatttcttggatttcttcttcagttaataaaatatcttttaaatcctctttcatttatgagtcatctccaatttttttaatatctattatatgtttaaagcttgtcgtcacataaagttgtcctatagcaatcactcgttgttttgcatctaaaatgatgggtatttgtgtacgttctatactatcaatttttttatcaatcaataaacgacttacttttttatgtccatgactaccatttaacttaaacttatctccatctctacgtgttcgaatcgttagaggccaatcgattgcttcattattctcatttggatgaattgtaattaaataatgaccaaattgatatgtataaggatgcgtaacaatttgttcttcaagtagagagtgttcataatgagccattattataaatttatcatatgcaatttgaattatccatttttcagtgaggggaattttaatttgagattgtttactctcaatttgctcgaaccattcattataatttttttctgaaaaagatttatttaactgaagcatctcaaataaacgatctaataaaatcatttttgaaatttcatctagttgattaaaagacgctcgagataattgtatacgttcttcattaaggtaaatgttaacatattgttctataaaacaacttattctttgttgtgtaagttgtaattgcatatcgtgccaatgtttcaactttaataattgttctaccttaaagtccttattttcatcaatagctggtaaaagccgattgcgaatgtcatttcttgcatatttattatggtgattagattcatcttcataaaaaggcacatggtgaatggtttgatactgttttatatcatttttatatgtctctatcagaggacgacaaataaagtaatgatttcgctcagtatattcatgcattcctaatgaattgcgcgttgatcgaccagtaaaaacgcgataaaaaatcgtttcaagttgatcatttaaatgatgagcagttaataaaacatcagcatttatcttgctcatcatttcatcaaaccattgataacgtaaatctctcgcttcagattgaatactttttcctttttctactgtttcagataaatctaactgtttaacataacagggaatttgatattgcttgcaaaattgtttaataaatcgttcttcttcgacagatgcatctcttaaaccatgattgacatgcaaacacgttatagattgatatgaatgtgataaatcatttaataatttatataataaacacatactatcaatacctgtagataccgcaacagctaaatgatccgtctttttccaaagagacgttttcactttcacattactgaacctcctgacttaggctaaataattgatataacgaaaaaagagtgagatagaactttaatttcagttctttatctcacccctggcatagatcttacatgatctaatgcacttaagttattatcaatacatattaatctagaataaatgattggaaccagggctccgttaacttagctatatttactcacacagatataattaacgtctagatcctttaccaccacgtcttgattctgtttgacgtttaatagaagtcaatttgtcttcactgtcttttaagaaattacttaatttcttttcaaaatcttctgctttttgttgaggtggtttattttgattagatttgtgatgtggacgacgaggacgatctttcgcttttttaattgagagactgattttaccatcctctgcaatagataaaacttttacctccacttcatctccaactgataaatgatcttctacattttcaacataattatcagcaacttcactaatatgaactaagccacttttaccttcaggtaattctacaaacgcaccaaattttttgatacctgtcactttaccttttagcttgtttcctacttcgattgacatattctaaataaatcctcccgataatgtttcaattttaaccttattatattcctgttttaaaatttacacaatgctataaaacgattattttaaattaagcgttttactttaatttttaaagttgagtactctttttaattattactagaggatttagaattagacgatgatttatcattaggcaatttaaaaataatttctccattgttacttaaataatagtcatctcgagcaactttctctatataatctttatcgttaagattattaagctcttcttttaatgctatttcctcatcttgttttttctgaaattgttcttctttctgctttcgttctattgttgcttgattgttactttgtttttggaagacaagcatgatagatagaataataataatcgctaataataatcctccaaaaactgttactcttcgacgaacaacacgcattcgtttttgttgccgttgtttctttcgatttcgttctgaagtatattgattatcaatatgttctacctttttactcataacttgtcacctcctttaaacgtttcaatcatagactacacttcttcagattgtgcagatggttgaactcgttcttctttaatcagttcatacatatttttagcattttcttttgatgcgtgttcacttaatccagttactttaaccgtcacacttttttgtccaaaacgaatgactaattcgtcttccacttttacatctgtgccagctttagctacattaccattaattgttacacgtccttgatcgctaatttctttcgcaagtgtacgacgttttacaagtcttgatacttttaaatatttatctaatctcatttatcattctccccttgttgtaaataatttttaagggtttcttcattaaaatccttatttttggttttatcatataatgtcataaaatggtctgcaaacactttctcaaatttcacacgaggtattttaccttcttttgcttttgcatccttccagacatcatttaaatcttctattgtttcaactgttttatctccgaatatgtgaggatgtcgacgaatcattttagcatttaagctttcaatcacttctttaatatccatatatccttcttttttaccaatactcgcatggagtagcacttgtaataagatatctccgagttcttcaatcatatgccaatcatcttcattatctattgcttcaaacaattcaaatgtttcttctaataaataacgtttaagtgattcatgcgtttgcacacgatcccatggacaacctttttcatcatccactagatggtcaataatataaactgcaaaatcaaaatcagtatacatatcttcatcacgcgttattttaggcacaaatacacttgttagattgttaaacatatcctcattatgatctaactcaaataacggtacttctaatactttagcgccttgactattagcgtccgtaactatcttcactttaaaatcgtctggataacgttccattaatgtgagtttaacatctgctgcaatcatcgcactatatacttgtgtaatgagagtatgtgttcgaatatttaatgtgttttctttcaaaatagtaccatctaataatgtaaatccatcattaggatcttcatcgattgcaacaaatatatcatctataaaactttttccacctaaaatctttacatgtatatcatcattatttttattgtaatcaagtaatttagcagtagtcgtttcagctacacgtggatgtccaggcactacgtaaacagtatcttgtatacgcgtttcttctattaaagtttcaacaatatgttgatacactgcttcaaattgatcatacttttcgtacacgtcatcaaagcttttaaattcaatgtcactttttaaatctttaataacaggatgttcgagtgtccttgcatatacactctgttgctgttttaaaaagcgatagacacctaaaggtaaatcatccatactatgattgcctatcccaacaatggtaagggtatgcgtcatatctatcttcctttctttatgcgatacagtttatcgccgaatggtaagtgttttaattctttatatcctaaaatattcatatacataacaagtaataggaatatgagaccccctattcctactataattaacaactcaattagactgcctaaacggcctacaggaggtaatagcattcgcaacccctgtatgactactgacattataatgagcgcactcatcaatttaacaataaacgcgcgcatgcgattaaaacgataatatttaacgacctcataatgtaaaatagtaacaaatattattagcgaaagcactgtgcttatacttgcgcctaaaatccccataaagtaaatgaaaatcacattaaagataatcttaaatagtagtcctgacatcacaccaataaaaataggtcgaatgtgattcatcacttgtaaaagtgcgatgtccatcatgataagcgatacaccaattatagtaagcgtataaatactaagcgtgaagcttaattggtctgttttgaaaaatacatggttcatcatcggtagtatattaataagacctatacctgctgctacactaatgagtagtgtaatttttaaagatgcatttgtataacgattcataagaacttgattatgatcagaaatggcatctgtaagtaatggaattaggacaaagctaaatgtagtagtcactattaaacctatttgaataaatgaagcgcctctatcatagattcctttttgcataatagcttctctaaatcctaaaccatatgtttgtagcatatgaacgactgtaaaactatctataaattgccataaaataactaataattgacttaatgcaaatacgagggtcgcaagtattagctgtttccaaggaataggatatgagtgctggtttaattgtaatcgaaaaggtcttgttgctaataaatatagactagaacctaaaaagccaagagctgaagctaatattgcaagtgctccagcttgataaatggtccactctttaaacataaacattaaaatagctatgataataacacacacacgaatacattgttctattacttgtgaaatagctgggatattcatttgttgtctactttgataaaaacctctaatcacacccagaattcctataaacaaatagctaagacttgccatttttaacattggtgctaaatgcgcatctcccattaatagtgctaatggatgggataatactaaaatcacactaaaaataataagacctatcatttgaaatcttagaagtgtttttgaaaatacttcagttccactgtgacttccaaatacttgagtgacagcactaggaattgcattcattgatagtatcatacctagcgctacaataggataaatttgttgatacgcatataatccagagtcacctaaaatattttgatatggaactcgataaattgcacttaatactttaacaatgactaaagcaagcgttaaaatcactacgccattaaatgctgaatgttgtcgtgaattcttagaagaagaggaaacttcagatgacgatttataattcgtactcaagttccatacttccttcaagacattttactaagaattttaagttgtctaaccactgtttggattttgttagagtaatatgcattttaccttctttaacacccaacttcattgttcgtcctaaaggttgggtttgtttaaataattcttcaccatttatctgttctgtacctttagttgaaaggaatacttcaatttgttttcctttatctttaatcaatgtcacgcctgcatgtaaagcgtgtattttaatctctaccatttctaataaacgttctacttctacaggataatcattgaagcgatcaagtaattcatctttcacatcaaaaagctgttcttcattttcaactttacgcaatttcttataaatttctattttagcttgttcattttgaatatactctgctggtaaataagcgtctaagtgtaattccatttcaacatctggtgcatcaggcgcttcttctgtaataccacgtttttcgtttaccgcttcttctaacatttgagaatacaaatcaaaacctactgaatcaatgaatccatgttgttgcttacctaataaattaccagctccacgtatatttaaatcacgcatggcaattttaaatcctgaacctaattcagtgaattctttaatcgcttgtaaacgttcttcagctgtttctgttaatactttattagcagaatgtaagaagtaagcatatccaatacgacttgaacgtcctactctaccacgtaattgataaagttgacttaaaccaaaacgatccgcttcttctatgattaatgtgttcgcattaggaacatcgacacctgtttctataatggttgttgtaactaaaatgtcgtactctccattaataaaactcaacatggtttcttccaaatctcgctctgtcatctgtccatgagcaacagcaatatttgcttctggcatcaacatttgtaactgttcacgcttttcataaatagactgtactttattgtaaaggtagaacacttgcccatcgcgagaaagttcacgttctaaagcctctttaataaaattactattttgctctaatacataggtttgtacagggaagcggttttctgggggcgtttcgatgacagataaatcacgtacgccaagcatgctcatatgcaatgttcttggaattggcgtagctgtaagtgtcaatacatctacatttgttttcaatgttttaatacgttctttatgacgtacgccaaaacgttgttcttcatcgacaataagtaatcccaaatctttatattgaatatctttactcaatagtttatgtgttccaacaacgatatcaacgtatccagatttcagaccttctttagtctctctaacttctttagcagtacggaatcgactaatcaactgaatttctactggaaaatcttgcatccgttcaattaatgtttcgtagtgctgttgcgctagaatcgttgtaggcactaaaaaggcaacttgcttgccttccatgacagctttaaaggccgcgcgtacagcaacttcagtttttccgtaacccacatctccacataacaagcgatccattggacgttctttttccatatcttctttaatttcttcaatagatttagcttggtctggtgtaagttcatatgggaagtccatttcgaaatcatgttgctcagccgtatcttcaccatattgataacctactgacatttctcgttctttgtatagtgcaataagttcatctgcgatatcttcaacactttgttgtactttggctttcgtttttttccattctgagccgcctagtttatttaatttaggcgatttatcttctgaagcaacatatttttgtacttgatccatttgatcaacaggtacaaaaagttgatcggttcctttatattgtaatttaatataatctctatggacgtctccaacttctagtgtttcaacacctaaataacgtcccacaccatggtgcacatggacaacatagtctccaacatttaaatcttgataagatttaattttttcagcattagaaattgttttagtccgttttcgttgttttttctgttttgttttaaataattctcgttccgtaattacaacaagttgcatataaggtagttcgaaaccttctgataggctaccttctgttacaattgcttgtccactttcaatctctgagtgaatatttgtaacagtaggaatatgcatttcattaagcatcgattgaatacgttcaactttcgtttcagtttctacaagtactacaatagtgtaattattgcttacataacgttgaaattctgaacgcataatgtcatattgtccataaaattgttgcactggcttacatgaaaatttaataatatgttgcaacttcactggcatagaggatgtgaataatgtgaaatatgtgactggataatgattgattaacgtttcaaacccatcatattccataaatgactgtccaataaacccgttaccactttcaattaaattctggataaaatcatctacttcagtagtcaatgtcttttcagtttctttaatacgattatattcatcaactactacaatggcatctttttggaaataatcgattagtgtagaaggtgtgtcatacataaaagcaactagacggcgaagtaattgatgatcaaagaaagtggattcaaataatttaaaactttcatatgtttctttcaaatcatttcgtacagatttatcaattttaggacgtgtttgttcatatgctttttgtaattctgtttgaagatgattaatcacatcttctgtaataatataatcactcgctgtagtgatatctaccttttcaacattatcatttgaacgttgtgtttctacatcaaagtctcgaatcgagtcgacttcagtgtcaaacaattcaattctaactggttgaccgataagggggtaaatatcaatgatgccgcctcgtagagaaaactcaccaatgtgagaaacaacactctcacgtcgatatcccatgtttactagtttatttaaaaattcatccacatcgatatcatcgccaacttctaaagtcatttgatgatgtttccacaattctactggagttaaccattttttcaaaccatttaaaggaacgataaataaccctttcttatcatgagataatgccgttaaagttctaacacgttcactcataagttgtgggctttgagttgaaaattcctctgtcataatatcttggactggatatttataaacttcagaatgatcaatgtattgcaatatatcagtttctaatttatctgcttgatataaattatttgtgattaatagcatttgcttatcatcattcaagtatttttcagcaataatggttgctttggctgagggagataaacctgtaactaaaatattttggttgccaaagacgtcgtcaagttcctggaatcgtttgtcattttgaatatagtcagaaataatcgttctcaattgacttctccattatattcattcataacatgatcgaaacgagacgtctcaataaatgcttccactgcttgtgcagcatgttcaattactttttccattgtcatcatttcttcattagaaaatttttgtaatacataatctggaactgacataccattcgttggtctccctactccaatacgaatacgtttaaattgatctgtacctaaatgtttaataatcgatttcattccattatgtccacctgcacttcctttttgacgtagacgaatatgcccttgagataaatccatatcatcgtataaaacgattaaatcttcaacttctacattatagtaatccattaaaggtcctacagcttctcctgataaattcatcatagtcattggctcgataaatagcactttatccccatttaaacgttcaatagtataagcgcctttgaatttttgtttatctaatgtaaattgatttttatctaaaatatagtcaatcacttcaaagccaatattgtgtcttgttcgttcaaaacgtttacctatattaccaagacccacaatacatttcatacgttgcaacctccattgtgttcatctttttgattgatttgaacatttaatttaatatgtgtcgattactccttattttataatattactcaatataatacaaaaagagagtaggaaagaaattcaatgatttcgtaacccactcttttataagttatcaaacttcaacttttattttaacattcattttttaaatgtccgatgtacataagaaaaagccttctacatatgaaaatgtatcaggctctttctatcaatttaattaaagacattctcacttaaagtgaatacatagtcatcaacgaattactcttcgtctttattttcttcgtcttctttgtcttctttgtcttcaccaactacttcaggttcttcagttgctgattcaccttccattgcttcaatttcttcttcagaaggttcatcagttggaggaactactgtaacaacagattcttctggatcgttttcaattgtgaaatcaccagatactttaatatccccaactgaatagctatcatttatttgtaaatcagtgatatctacttcaattgattctgggatattttctggagttgctgtaatttgtaaatcaaataatggttgttcaactacgccgccttctttagcgccaactgcttcaccaactaattgaactggtacatcaacagtacgttcttcagtcatgttaatagctaagaagtcgatatgagtaatttggtttttaagtggatcaaattgataatctgataccataactttaattgttttagaaccaacgcctaaatcaataacaccgttacgtccaacttcacggatgactttgatgaattcaacttcatctactttaactgaagtgtttttagtaccataaccataaacaacagcaggtactttacctgtattacgtaattttttaaggtcagaacgagtttgtttaccttgacgaatgattgactttaatgaagccattcgtatttccacctttcattttcaagttgaaacaataataatatattgtcttaacttctcctcacttgcccatcaatttaaacattgcttgcaagtgtttatttattcgttaaatcacgaacgaataaattatacatggttaaaaataataagtcaaattcatttgtaaattttagtcaaataatacacttactgactcacgttcatatacacgaacaatagcttgtgctattaaaccagctacagataattctttgatgtttgatggtttttgactatcgtcaagtaagattgaatttgtaacaataagttctttaatcgctgaattttcaatacgttcttttgcaggacctgagagtacaggatgtgtacaacaagcatatacatctttcgcacctttatcttttaatgcttgagcagctaaagtaattgttcctgccgtatcaataatgtcatcgataataatagctgtacgtccttcaatttcaccaacgatattcatcacttctgccacatttggtttaggacgacgtttatcaataatagcaatcggagtttttaaaatgtctgctaatttacgtgcgcgtgttaccccgccatgatcaggagatacaacaacacattcttctgggttgatgttaggattattttcaaaatattgtccaataatcggtacgcccattaagtgatcgattggaatatcgaagaaaccttgaatttgtggtgcatgtaagtctaaagcaatcatacgatttgcaccagcagtttcaattaaatttgctactaattttgcagtaattggttcacgactacgtgcttttctatcttggcgcgcataaccataataaggaacaacaatattaatatttgctgcagaggcacgtttacatgcgtcaatcataattaataattccattaaatgtaagttaactggataagatgtcggttgaatgataaatacatcacaaccacgaatactttcttcaatattaatttgaatttcaccgtcactgaagcgtttaacagaacatttccctaattcgattcctacacgatcagcaacctcttgtgctaatggttcatttccctttaaagaaaaaatctttaaagacgaatttttgtactcattatttaacatttatagtcctccaattttttacttagacaatactattatataaaaattatagcatttttactatattccactaaaaactgaccaataatatgtttattacgtatcattcaacttagcataatagtaatacattcaaaattttatatttatatattcatttattccctttaacagaaaaatgacacagtctttttgttcttatattaatctttattttttattgtaaccttctttggttacttgacgtgcacgtgctaatgctaagctttctttaggtatgtcatctgtaattgtcgatcctgctgcaattaaagcgccatctcctactgttacaggagcaatcaaattcgtgttacaaccaatgaaagcatcttttccaatgactgttttaaatttattgactccatcataattaacagtgattgaaccacaaccaatatttgtacgttcaccaacttccgcatcgccaatataacttaagtgtgatacttttgcaccatcttttaattctgctttcttaacttctacaaagttacccactttaacttcagtacctagatttgaaccaggtcttaattgagcaaacggaccaacttttgtcttatttcctacactagaatcattgatgactgattgtataatattaactttgttgccaatacgactgttgttaatttctgaatattggccaacgtgtgtatcttcaccgatgaatgtttttccattaatacgtacgcctggttcaataacagtatccatacctatctctacatctgaacctataaatgtagtattgggatcaatgattgtaacaccatttctcatatgatgatgattaatacggtgttgcaacgctttttcagcatgacttaacatgattcgatcatttacacccataatttcatcaaaatcatcagtatgatacacttctgttttgccattatcttctaaaattaaagtaacgacgtcgggtaaataatattcaccctgtgcattatcatttttaacttgtttaagtttttcgaataacgttttattatcaaatgcaaatatacctgagctgatttcattgatgtctttttgagcatttgttgcatctttttcttctacaatacgattaaggtgatgattttgatcacgtacgattcgcccatacccgaaaggcgtctgagctgtagccgataaaacagtgacttgtgcttgtgtttcttcatggtgtgcaattaaacgttgtaaagtttctgaagtaataagtggtgtatctccacataccactaatgttgtaccttcttgagtatgtaaatgttcttctgccattttaacagcatgtgcagttcctaattgttcattttgataactatataatgactgattacctaatgtatcttttacttgttctgctccgtgacctacaatagtgacgatttgatttacgcccgcttttttaacatttgtcagtacatgttcaaccattggtttaccagcaacctcatgtaacactttatatttctttgatttcattcgtgttccttttccagctgctaatatgattgcatttctttgcatgaataataatcctccaataaaatttgcacttcacaagtaattataatttaacttaacttatagtttcaagatttaacaaattttgtaaacagagtttaattatttgcatcatgcatctaatttttaaaaaatatcgataaaacaataaaaataggcacgaaacaaaattcaagtttgaatttagagtttcgtgcccacgtcatttagcttacataattaataaaataagcattatcaaaaatatgatttgcttttgttattttaagcttcgtctgattcttctgttacgtctgatgaagcatttttatctggaatcacttcgtcagtttcatcatatactttcatcacagcatcctgtatttcttgtctcatttctgaattgattggatgtgcgatatcgcggaattcaccatctggtgtacgtttgcttggcatagcaacgaaaagacctgagttgccttcgattacgcgtaaatcatgaattacaaaagcttcgtctaatgtgatagaaacgagtgctttcattctgccatctgtttgtatttttctaagtcttacatctgtcactttcatgcagtgagcccccctagtatatatatctttgtgtggttagaagcatgacaatgtgttaattaagtaaattatattcctttaactttacctactaattcaatttcaactttaacgtcttttggtaagcgagacacttctacgcaacttcgcgcaggttgatgctcattaaagtagctaccataaacttcattaatttgttgaaattcattcatatcagaaataaaaatggttgcttttacaacagagtttaaatcagaacctgcttcttcaagtacaacagataaattttctaatacttgttttgtttgttctttgacatcgctacttacgatgtttccttcagtatctaatggaatttgtcctgatgtgaatactaaattattcacgaccattgcatgagaatatggtcctaacgcttcaggtgctttattagtattaattgttttcatggtgtataactccttttaagaaaatttagacaagatattaccaggttcaactttaaattcttgattatattcgtcaacatctgataatttgactaaagaagtataatcctcaatcaatctttgttttacttcttttgattctactagtacagataccccttttacctctgctttaaactcattcataagattcattacaccatttattgaaccgcctgctctcataaagtcatctacaactaacacatttgagttttcggctaatgtgcgtttcgataagaccatcgtttcaatttttcttgatgagcctgaaacatagttaatggaaaccgtagaaccttcagtaactttattgtcttttctaataactactacaggtaaatttaatacgtttgctactgcattggcaagtgatatccctttcgttgcgatcgtcactactgcatctagtttctcatccatgtaaatactagcaatgagtttccctactttattaagtaatgatgggttcccaactaaatccgataaaaataaatatccacctggtaataagcgctctttttcttgtagcatcgtaatgatttcttctataatttcgattgcttcttctttgctcatcattggtttataggttacaccgccgcttgcgccagctgttgtaattacagttcctaatttttctttttggaacgtatttttgatgatttgaacgtcttcactaatcgatgactttgcttgtttaaattttttcacgaaaaaagttaatggaattaactgatttggatggttcattaaatattgtgtcataaagacaatacgttcacttcttttatacctcataagttccagcctttctatcctaataatcttactaaatacacttcgttacaacagccatttacagcattatatactttctttgcttggctctccttttgagcgaatgcatatacagtaggtccactcccactcattagtgctccatcagcaccacaacgcaacatattatttttaatttttttaatttctggatacatggacatagaaacggtttctaaacgattagataaactcttacacaatttcatataatccccctgtctaatcgcttcttcacacatttctgtatgtacatcataatcatctttcaaattaagttctttaaaaatatctggagaagatattccaagattaggttttgctaataccacccatgcagaaggaggcttgtctagaaatttaattttttcgcctcttccttcacatatagcagttttattatagatgcaaaatggaacatctgtcccaatttgaaggcctaattggcttagtgtttctaaagatgcgtctaattcatataaacgattaattcctcgcatcgtagcagcagcatcagctgatcccccagctaatccagcagaaaccggaatatctttatcaatcgaaatcgtgacgccttgtttaagttgatatgtttccatcatcagtttagctgcttggtaggcgagatttttatgatcattagtaacatagttatgttctatatctacaacaattttattatcatttcttttctgaaaagacaatctatcattcagatctactgttgtcattatcatagcaatttcatggtaaccatcatttcttttgaaaagtgtatcgagcgtcaaattaattttggctggtgccgtttcatatatcatttttccgccctctcttcatcaatagtattaaaatgattttaacataaagacttaaaatatttgatagttacattataaattataattaaaagttaataaattaggagataaatgatcttaatttcaactgcaaatcttgatttatttaaattattattttattaaaagtgattaagaactaaaaagagtgttgaacttaaacagcccaacacccaatatgtttttaatgatagagtttgtagtacactaaacaactctatatttatatgttcgaatttagtgtgcaactacttcttgatgattatcctcttcaaatgaaacttgtacgttctctgtaagaacatccgtatatgtatacgacactctttcaaaattatgcttatcttgatctaattcaacaataaatactgaaggatatgtctcttttaacactccacaacgttcgattgttttttttcgaccaccgttggctttaagtacaatacgatttcctaaatgacaatcaatagaatttttgatgtccaaaattgattttggcatattgctccacctcgctacaggttacataatatcacatttcgaagtaatatgtcaaataaaatttaaattttatcaaggtaatgacactttgtcaataatttaattttctaattctgggaaatttttcttttcttcatacaatcgtgcaaaatcttgtatagaaagggtttctccacgacgtttaggatcaatatttgcattttctaaccattgatgaatttgtgatttatattttttaccatctttaaagaaattctgataattattattaatcgttttacgtctttgagcaaaagcagcttttgcaagtttaaagaaagcttgttcatcatctactgaaacaagaggcttctctctttgcatcaattttacaacaatcgagtcaacatttggtggcggcataaacactgatttagggacagtgagtactttactcgtttctgtgtagtattgagtcacaatagataaagaaccatatgcttttgtacctacttctgcatttaaacgctctccaacttctttttgcatcatcactacataaccatcaatggggatatcttgttgcattaaattaagtaaaatcggagtcgtaatatagtagggtaaattcgctactaccataattttatcgcagtcatttaaatacatgttcacagcggtagctatatcagcttttaatatatcttcatttataattgttacattgtcatagggatgaagtgtttcttttaaaactggaattaaacgttgatcgatttcaaatgacaacacttttttagcacttttagcgagttgctcggttaatgatcccataccaggacccacttcaattatgcctgtcgacttatcaatataacttgcatcaataattttatgaataatattaacatctactaagaaattttgacctaagcttttcttaaaattaaagtcaaattgatttaatagttcttttgttctagaaggtgtagctatatcttttctatccatctttacttattctccttatccattgataatgcacgtcgtacgtcttcttcagtataaccaaaagcatttaatttttttagtaattgtttgccattagaatgtccaatatgcaatttacgtccaagtatttctctcttacgtctcgcatctttaccaataattaaacctaaatcaattaatacacttttatctatcgactcttctccttcttcaaaaggagaactcacatgcattaaggctgtctttatatcgtcaggatgtgtatgttctatcccaatttttccacgcttatttttcgctttttcacgatcgacataggcatgtttaactcccggtacgtgttcagtaataatatttctaattctatcacctggaaagtcaggatcagttaatacaatcacgcctcttgtttcttgagcattctgaatcactgccaacgtttctctattaatggcacttccatttgtttcaatcgtatcacatttcacagctgtcttaactcgttctgtgtcatctctgccttcgacaacgataaattcatttattctcatattcatttaccattacctttcatttaatctcatttctattataacggttatactataaaaaaaatgagaaagatgcacatattatcgtcactcactattagatagcattacgatagatgatgttttacatctttctcatactgaggattattaatttaaattaaataatctttctgcattttctgtagtttgacggcatacctcttcgtatgtcatattacgtaaatctgcaatttgttgtgcaacaagcgtgacacgttcaggttcattacgttttcctctataaggatgtggagataaataaggtgcatctgtttcaactaataaacgatccattggaacatgtttagcaacctctttaggctgttttgcatttttgaatgtgactggtccacctaatgaaacatagaaattaagtttattaataacgacatctgcaatttcaggtgatgcactaaaactatgcataatacctccaacttcttctgcatgttcttccattaaaatatctacacaatcttgagttgcttcacgattatgaatgacaataggtaacttaacgcgtttagctaaagcaatttgctttctaaacacttctttttgaacatcagctggagatttatcccaatgataatctaatcccatttctccaatactgataattttaggatgctgagctaatgattcaatccattctaaacgttcttcagtaaaatctattgcatctacaggatgccaaccgataataccataaataaaatcatattcatcaataagttccatagtacgttcaattgtcttagtatcaaatcctacgacaaacatacggtcaacgcccgcttctcttgcacgagatatcacttcacttaaatcttcatcatattgttcgtcatttaaatgaacatgtgtatctattaacattttatctctcctaacggctatatttattttataattgcaccatttggaattgcactcggtaagcttactaacgttaatactttatctttttcagctgataatatcataccttcagatttgtgccccattaatttggctggctttaggttagttacaacagccacttttttgccaataatatcttctgaacgatagaatttcgcaatacctgaaacaatctgacgttgttctgctcctaaatcaacttgtatttttaataatttatctgattttggtacattttctgcatcaataacagttgcagctttaatttcaactttatcaaaatctttaatatcaatttgcgatttacttggtacttcttctttatcatcttcactagatttagggggttgcattgattctttaataaatgcaatttcatcctctgaatctaatcttgggaagattggagaaggtttttcagtaaccataattggttcttgtaatgcaccataatgctctaaacttgataattcgtataaatctgaattattaatattcaattgtttaaaaatttctttaggcgcatgtgttaagaatggacgcaataatacagttgcaaaacgaatattttcaactaagtgtgccattacatttcctaacatatctttttgactttcatctttagctaaaacccatggagtggtttcatcgatgtatttatttgttcgacttattaacttccaaactgtagataatgctactgagaattggaaactttccatattgtcatggaaattcttcacagtttcaagtgctaatgcttccatatcttcatccaattcatgttttggtccttggtatgcagggagctctccttggaaatatttattaatcatagaaatcgtacggttaactaagttacctaaatcatttgctaagtcgaaattagtacgttcaacaaatgcctccggagtaaatactccgtcagatccgaatggtaattcacgcattaagtaatagcgtgtagcatctaagccataacgattaatgagaacattaggatctactacattacctttagatttactcatttttccatctttcattaaaatccatccgtgcgcgaatacttttttcggtaaaggtaaatcaagagccataagtaagataggccaaataatagaatggaaacgaacaatttcttttgccattaagtgtacatctgctggccaatatttttggaataatgaatcatcatctgataaatatccaagagaagaaatatagtttactaaagcatcaatccatacataaactacatgtttagggttagatggaactcttaccccccaatcaaatgacgtacgtgaaactgctaagtcttctaatcctggtttaataaagttattaatcatttcattttttctagatggaggttgaataaaatcaggattcgcatcgtaaaattctaataaacgatctgtatatttattaatattaaagaaataactttcttctttaactaattcaacttcatgtccagaatctggacttttaccgcctgcgattttaccattttcgtaaacagggtctacaagttgagattcagtataatacgtttcatcaggaacagaataccatccctcatattcaccaagataaatatcaccttgttttaataaacgttcaaatactttttctaccacttgtttatgacgttcttctgtagttctaataaaatcatcatttgagatttccaatttagcccataagcgtttgattccagcaatcatttcatctaaatactctaattctgtttttcctgctttttgcgctttttcttggattttctgaccatgttcgtctgtacctgtaaggtaacgaacatcatatccttgcatgcgtttatatcgtgcaattacatcaccagcaactgtagaatatgcgtgaccaatatgcagattaccactaggataataaataggggttgtaatataaaatgtttctttcgccatcagtagtcctccctttcgttcatgtcttaatgactagttcactttaaattttatctaaatttttaattattttctaatgaatgtttaatataacgtttgtcataaaacagctatcttattcattataacccatatagaatatacattgtcgtatcttattaacattaccataaattaatattttatggtatttttctatcactatgatgcaagattttatcaattttacgatttaatattatgataaatatcataaatctcacttgttttcatctgtcgttcttctgctactacttttattgctttcttaggttttaaattttgagtctcaatataatgattaacatgatctataatcgttacatcttcaaaccattgttttgtttcttgagctttggcaccctcaattaaaatcacaaattctcccttttgtggaatctcttgattttcaatcgcttctaataattgtgatacttcaagcataacaatttgttcaaattttttagtaagttcacgacctactgctacacgtctttttgaatctactttaataatcgcttttagggtatcaatcactctaaatggagactcatagataattaaagtactatcttgatacattcgttgagataaaatattcactttttccttttcttttcgtggcaagaagcctaaaaaagtatatgtaaatgaaggtaaaccacttgccattagtgcagttaatcctgcattaggtcctggaatggtttctacagcaatgttatgtttatgtgcttcaacaacaagttcatatcctggatcgctaattaacggcaaccctgcatctgatacaagcgcaatattattttcttctttaagtaattgaattaaataatctgtctgctgttctttattatgttcatgatatgattttaatagagtggtaatatcatagtggttacataactttttagttactctcgtatcttcacatgcaatgatatctacttgttttaatgtttcaattgctcgaaatgtaatgtcacctaaattacctataggtgtccctactaagtataaagttgccatattatccctcctcaatcaattttaattttttttgtcttgtaaatgtcttaatttcatattctctgcgtaaagcttctgattttgtgtcgtacatttcttgatatactaacactaccggacgtcttgtttttgtatatttagcacctttcccagcattgtgtttattgatacgtacctcaatattattagtatacccggtgtataaactgttatcactgcaacgtacgatatatacaaagtgattacccataataaacctctttcatttgctcactatattcgccattttcattataaatataaaatggtggtgcaatctctagaccttgattaccattttttcttccttcaacaacaatagtgactgctgatttaccatgcttactataaataaatacaatacgtttaggttcaatattaacttgtctcatttcagttaatacatccataagtcgttcagcacgatgaaccataactagacgtccaccctgttttaataaatgtcgtgctgcaaacatgcaatcttctaaactacacataatttcatgtcgtgctattttatgtgcttctttttggtgttgatgaagttgattctgtttaaagtaaggtgggttacaggttattaatgtaaactgagagggtttaaatgtttgatacacatcttttaaatccatattatgcatagataaacgctcttctaattgattatatttaaagcttcgttgagccatgtctgccaactgttcttggatttcaatactttctattttttgatgactttttgcagctaataataaagcaataataccatttccggcacacaagtctagaatgctatcattttttcgtactttagtaaaatgtgctaataaaagtgcatcagtagaaaaagaaaacacctcatcattttgaatgatctttaagttctccttaattaaatcatctaatctttcttgttccttcaacatatatgttatctcctaaaaaagagatgtatcacaacacaaaatctgaaattttattgtgttgaaattcatctctcctaaaaattaagattataccatccgcttatcattctccgttatggatttaactatttaaaacattcatgcataataaacaatcttcaccataacgatgtttaccaaataattcaccattacaaatatgaaaaccttcactatacaaaacagctaaattgtctttacttggtaaaggtttttttacatttttaattgcacttttaaagtcattttcatttgattttttattatgtggactttcactattggcttttgttgattcaacatcttgttcacttttagccattagcgcttttaaattatcgttctctacttgtaacgttacattttcttctatcaattgaatagctaaagatttaagttcagtcatctcttgagttaatacattaacgttactttctaattttacgattttttcgaataaatcattgcgattcaaaagaaagacactctccttaattaaatgtagctaattcctccattttatattctaaaggttgctctaaaccatcaatcttcacttgcatcgaaatatctaatatatttaatcctacaacttttccagtaccttccggtgtatgaatttcatcgcctacatctggtaattgtgcacgagcttcttcataataatcattttcatatttaagacaacacattaaacgtccacatgcaccagaaatcttagttggatttaatgataaattttgatcttttgccattttgatagataccggttgaaaatctcctaaaaatgttgaacaacataatgaacgtccacatggtccaattccacctagtagttttgcttcatcacgaacgccaatttgtctaagttcaatacgtgttcttaaattttgagctaatactttcactaactttctaaaatcgatacgatcatcagcagtaaaattaaaaatgactttcgatttatctaaagtatactcacaattcactaagcgcatatctaagtcttgatctttcactaactgtttacataaaattaatgcttgctctgcatctttttcattttgtttgtattgttgtatatcttcttcagttgcaatacgtagaatatcttttaacggtaatgtcacatcttcatcatttacacattttgaagtcaactttactatacctatttcaatgcctcgcttagattcaactacaacccaatcttcactatctaattttaaatcattcggtgcataatattccaatttacctgctttttgaaattgcacacctactacatttggcatttaactcacacctttaattacgatttgttcaaatacgagcatcggattcacattctgtatcaattttttatgtgcttctataatttgatcatacattaatatcatttgattaagtgttaatcgtgttgtgtattccttaatgagtggtttaagatcagtaaaaatgaaattatcctcaatcccgactttagcatgcatcatatcttcaaaaaaagcattgataacagacaaagtaagaagttgtagttttcgatttttagcattttttaacacatcaatcacactaatcaaggccattggtttatttgttaataataattcacaccaatgaacgattacttttcttaattcaattaaatcatactcttcattaaggtctttggctacctcaatttgtgtcgtatatgaacttaacatttcagcaatagcccgattaataccattatcgacaagtttatcgataaaatgcgatgtgtcacttggtttaaaatacatatgttgacatctagaatgaatcgtatttaatatttgttctggtttagtagaaattaaaattgcaatagtattttctggaggttcctctaaaaattttaagatactattttcaccttgaacagttaacttttcaaagtcctctatgatataaactttatatgtaccttcaataggtaattggttcatttggcgtacaagttgttcaatttgttctttttttatagtagattcttcagaggatatatatgtaaaatcaggatgattaaaattacgcaattttaattcacattgttcatttccattacaaagaataagttgtgcaaattccatcgctacatgtttcattgattgtgcatcatcaccttcaaataaataggcatgtgataatttattcgaatgaaaagcattagctaatttttgtaattcttccatatttgcatactccctattcatcgttcattttaaaattatatcattaaatttttcagtcgcatttatcattcagcaattaattataatgtatatgataaagagccgataacataaaaatatgtttcaggctctttgaaaattatcttttaaaactttatttaattttaaattaagtttagaatctgtggaatttttctactggcattacaaatactgtagcgcctccaacttcaacttcaacaggataaggtatgtaagagtctgcactaccacccattggcgtcattggtgaaacaagttgatctctattaccacacgtattatcaatgacggttaacgcttcatcaacacgttcatcatctacaccacataagaatgttgtatttcctgctcttaagaatccaccagttgttgctagtttagtagctctaaaattattttttacgagttggtctgaaagttcttgactatcttgatcttgaacgatcgctataatcattttcattttaatacacctctttatattattatatcataagttttttaagtaacttaaaatgatctcatacgtatcacttatgacgctttcgatgctttgtgtagcatcaactactttaaaacgctcaggattagttttaattaatattttatacccctcaattactttttgatgaaaagttagtgtttctttgtctaatcgattctgacttctttgattttttagtattcgttctctccccacttcagcatcaatatcaagataaattgttaagtctggataaagtccattaattgcaaattcatttatttttttaacttcttctatacctataccccgtgcatacccttgatatgctaaagaactgtcaatatatcgatcacataagactactttattattttttaaagcgggtatcactttttcaaccaaatgttctcttctagatgctgcaaataacaatgcttctgtacgtatatcaatattttcaccatctagtaagatattacgtatttcttcccccgtagatactccacctggttctcgagtagaaataacattataattttcagataacaacttattaatctgatttaacactgtagttttcccagaaccttcaggcccttcaaacgttataaatgcagccatattattcatccttaactaatattttatcgtttttaataccttcaacacgtacactatgtgaaagataatattgcatcaattttatcatatttttagtcactttttctcctttccaaaacacaggaattccaggaggataaggcacaatatgttgagctaatactttatgttgtgctttattaatatttatccaatatgcatgattaatatattttgatacataaacacttttctctagcggcaataaaaccggctctagcttttcttttgcttttttaggtaattgtatagtttttattctatgcagtaatgtttcgaaaggatatctatcattaaaatgccataatggtaagacaatgagtatttgataatcatcagctaattcaatataaatatgattcttttcaaaataacgttgtacttcaaaacccgtatgcccatttgctcgaacaataagctttaatggatcctcgacttcaataacttcaaattgctgttgtcttaacgtttcaataaattgttttcttttttcaaaaaagagactactgtcataggaattataaaattgatgcgctagttcaatgctcgacattaccaaataagatggactagaagtttgaaaaatacctaaatatttaataacttcatctttcaaaggtgcatttttatgaataaataatactgatcccatagtaagtgtaggcaaagttttgtgatacgattgaacaacatagtcagcttctgattctaaagctgatttaggaaagtgtttcaaattaaaatgggcaccatgagcctcatcaattaaaacgggtatattgtaatcgtgaaattgtttaacacactgattgatatcaaagcattctccataataatttggataagtaactacagcgagtttttgatgtcgtaacattttagtatctatcaaaggtgctaaatactggtaacttttatcacttctatacataggcaaaatatctgcagattgttgagttaaatctaaagcattaaaaactgatttatgtacattacggctaattaaataacgaccttttatatgagcaaatgcttgtataactgataaaatacctgcagttgtaccattaactaaataataagcatcataattgggatgcttattcacacgattcatactttctaaaatagtatcttctggatgatgtaaatcatctagacccgtaatttcagtcatatccattttcaaagataatgcatctaaataaccgatagtcatatttttatgtcctggaacatgtaatgagatagcatgatgacgaattaaatcatcaagtttttgagtgataggtaatttcaattaagtcctctcctcatataccttatatacctttaaatatctcctattttaatagataattcaaaaaaataaaagaaacgctaaaatttctgttgcttgatttcttctcgattcattagctccaaacactttctataaatttggacataaaaaaagagacctcacggtctcaatatcggctcatcgcatccatacaatgatttgcctggcaacgtcctactctagcggaacgtcagtccaactaccatcggctctaaggagcttaacttctgtgttcggcatgggaacaggtgtgacctccttgccattgtcaccagacaagtgaatgattatacattcaaaactagatagtaagtaaagatttgcgtcgcaaaacttgaaaaaattgattaagtcttcgatcgattagtattcgtcagctccacgtgtcaccacgcttccacctcgaggtggaagcgtggtgacacgtggagctgacgaatactaatcgatcgaagacttaatcaattttttcaagttttgcgacgcaaatctttacttactatctagttttgaatgtataatcattcacttgtctggtgacaatggcaaggaggtcacacctgttcccatgccgaacacagaagttaagctccttagcgccgatggtagttggactgacgttccgctagagtaggacgttgccaggcaaatcattgtatggatgcgatgagttgatattgagaccgtgaggtctcttttttttattttaaaatatatatctatatataactaattaaaagatgactaaatgaatatacactacggatggttagcatagtgactttcataaaaaagtccacgttcaatgactaccaatccaaaatgagtcagaactcatttcctctatttaaactgtaagtgctttaataagagcattaacatgcttctctaatttttcttctgggatacctccaaacccaattaagaaggtaggatgttgtagttttttgttgttgtaaggatatggtgttaatttaagattgcattttttcgttctttttatgcattcatttattgtcaaattatttttaactacaagtgtgaagtgcattcctgttagtgcgccttcaattttcaattgttctttatatggtgttagtttttctaaaataaaagttaatttatttttatatattcttctcattttattaagatgacgttcaaagctaccagttgccataaattgtgctaccatgtgttgtaaatgtacaggcacagtattgctttcaacatactgcatctctcggaataattttagcagtttatttggtaagacaatgtaggccatacgacaacttggataaagcgatttcgaaaatgtactaatatatattactttttgttttttatctaaattctgtaatgctggaataggttttccgaaatatctaaattctgaatcataatcatcttcaataatatatcgttccttcttttgttgtgcccattttataagttgtgtgcgcttctttaaactcatcacatatcctgttggaaattgatgagatggtgtgatatataaaatatcattatttttttgaaagacttcatcgatattaattccatctttttctactctagcttgtgtataacttattctatgcttatccagtacatgtttaataggtggataactaggttgttctataataaatgatgaatcttttaataagtcagtgaccatatttaataattgttcagttgaagagccaattataatttgatctagatgacaagatactcctctactattaaataaataatgagaaatttgctgtcttaagttgaattctccttgaacgcttcctttactcaaaagggcaagttgatcttcttcaaatacttctttagcatactttttaaataaatgactaggaaaatgtttagcatcaatttcagctaaattgaattgatactgatacgtattttcctgtgtagctttatcagtttctaatatatcacttatttcagggtaactatttgttactggtaatgattgaatttctgaaacataataacctgaacgtggttttgaatatataaatccttcatctaaaagtaactgataggcatgctcaattgtagtatgactaagtgataaatgttcgctcaactgtcttttagatggaaatttatcgtttgattcatatacaccttcaataatttgtttttttaacttttcatataaagaaatatataatgattgtttcttcgtcataaatctgacccctaattttttattaaaattgtacctttttaaatatcagtttatattttaaaatggatttaatcaattgaaaaggggttttataaatgtctaaaattgtaggatctgaaagagttaaacgtggtatggctgaaatgcaaaaaggcggcgtcattatggatgttgttaatgctgaacaagctagaatcgcagaggaagctggagcagtagcagttatggccttagaacgcgtaccatctgatattagagcagctggtggtgtagcacgtagtgccaatcctaaaattgttgaagaagtaatgaatgctgtttcaattccagtaatggctaaagcacgtatcggtcatattacagaagcacgtgtattagaggctatgggcgtagactatattgatgaatctgaagttcttactcctgcagatgaagaatttcatttaagaaaagatcaatttactgtaccatttgtttgtggttgccgtaatttaggcgaagcagcacgacgtattggcgaaggtgcagcgatgttacgtactaaaggagaacctggaacaggtaatattgtagaagctgtacgtcacatgagaaaagttaattcagaggttagtcgtctaactgtaatgaatgacgatgaaattatgacttatgctaaagaattaggtgcaccatataatgtattaaaacaaattaaagaagaaggtcgtttaccagtagtaaactttgcagcgggtggtgtagcaacacctcaagatgctgccttaatgatggaattaggggctgatggggtatttgtgggttcaggtatttttaaatctgaagatccagaaaaatttgcaaaagctattgttcaagctacaactcattatcaagattatgaattaattggaaaattagcagctgaattaggaactgcaatgaaaggtttagatataaataaaatctcattagaagaacgtatgcaagagcgtggttggtaatttatgaagattggtgtattagcgttacaaggtgcagtacgtgaacacattcgtcacattgaattaagtggtcacgaaggtatagcagttaagaaagttgaacaattagatgaaattgatggtcttattctccctggcggtgaatctacaactttaagaagacttatggatttatatggctttaaagaaaaattacaacaatctgatttaccaatgtttggaacttgcgcaggtcttattgtgcttgcaaaagatgtagaaggtgagacaggatatctaaaaaaattagatattactgttgcgcgtaattcctttggtagacaagtagatagttttgaagctgagttagatgttaaaggtattgcaaaagatatagaaggtgtctttataagagcaccacatattgttaatgtagaaaataatgtagaaatattaagttctattagtgataaaatagtagctgttaagcaagggaaatacctaggggtgtctttccatccagaattaacagatgactatcgtataactcagtattttattgaacatatagttaaataagaaaaagcttgagatcaaaatctcaagctttttcttattaaatgaagaatccagcgatagcagctgaaataaatgatacaagtgttgcaccgaataataacttaataccaaaacgtgctacgacatcacctttttcagagttaagtgatttaatcgcaccagaaatgatcccaatagaactaaagttagcaaatgaaactagaaatacagacgtaataccttttgcatgctcagaaatacccttcaagcttccaagtgattgcatagcaacaaattcattagataataattttgttgccatcacagaacctgatttaacggcatcctgccaaggaacacctgctaagaaagcaaatggtgcaaatacaaaaccaattaacgtttggaaatcccatttgattgctccgccagaaattaaactaaaaataccacttacaaggccatttaataaagcaatgattgcaatatagccaattaacattgcaccaacgataactgctactttgaaaccatctaaaatatattcacctaacatttcaaaaaacgcttgttttttagtttctgattcatccactagcaatttgtcatcttcttcattaactttataagggttaataatagaagcaataatgaagccaccaaataagtttaatacaaccgctgtaacaacatatttaggttcaatcaatgtaaaatatgcaccgataattgatgcagatacagtagacattgcagaagcagttaaagtatataaacgttgtttaggtatatatggtaattgttgttttaatgaaataaatacttcagattgtccaagaatcgcagctgctactgcattatatgattctaaacgccccataccattaattttagaaattaagaaccctaacacattaataatccatggaagaattctagtatattgtaaaataccaattaatgccgaaataaatacgattggtaataagacactaaagaagaatggtggattgtttggatctacaaatttaaatcctccaaaaacaaaattaactccttcagcagctttttgtaacaaatagttaaatccatttgaaataccaccgataattgtaataccagcagtcgttttcaaaagaataaatgcgagtataagttgaataattaataataatccaacatagtgccaacgaacattctttttatctgaactaaataaaaatgctagcgctaaaaagacaataatcccaatgatcccaataagaatatgcataattctactcctttaaaattctctttatcttatataatacaataaaataatagaagtaacattaatatttttaaataaaaaaaacaaattggttgaaaaaggtcaaagttggtcatataatatagtcaaagaaggtcaaaaggggtggtaaatcatgcacaacatgtctgacatcatagaacaatacattaaacaactatttgaagaaagtaatgaagatatggtagaaattcaaagagctaatattgctcaacgtttcgattgtgtgccttctcaactcaactatgttattaaaacaagatttacaaatgaacatggttatgaaatagaaagtaaacgtggtggaggaggatatatccgaatcacgaaaattgaaaataaagatgcaacgggttatattaatcatctattgcaattaattggtccttcgatatctcaacaacaagcatattatataattgatggtttgttagataaaggattaattagtgatagagaagcaagaatgattcaagtgattattgatcgtgaaacactatcaatggatgttgtttctagagatattattagagcaaatattctcaaacgattattacctatcattaattactattaataaataataaaaaaaagcgaggtgtctatgtgtgctttgcgaaaattgtcatttaaatgaagcagaggttaaactcacagtaaaaagtaaagatggtacctctgaaaagtgggtgtgttcagaatgtgcgcaaggagagcatccttggaatcaacaagaacatgctgcatcacattcagagttccaagatgatattgaagaagcctttgtagtcaaacaaatcttacaacatttagcaactaaacacggattaaattttcatgaagtagcatttcaagaagaaaaacgatgtcctacatgtaacatgacattgaaagatatagctcatgtaggtaaatttggatgtgcaaattgctatgcagtatttaaagaggatattgttgatattgtaagacgagtacaaggtggacaatttgaacatgtaggtaagatgcctcgttcttcacatcataaactggcaataaaaaaacaaattgaagaaaaaacgaattacttaaatgtattaattgaaaagcaaaaatttgaagaagcagctgtcattagagatgaaattaaagccttgaaacatgaaagcgagatggagcatgatgaatgatatgggtgcacatattagtgaatggatgaaagaaacagatgaatctcctattgtaatgtcttcgcgtattcgtttagcacgtaatttagaaaatcatgttcatcctttaatgtttccatctgaacaagcaggttttagagtaatcaatgaagtgcaagatgcactacctaatttatctttaatgcgtttagataccatggaccaacaaagtaagatgaagttagtggctaaacatctaattagtaaagaattgattaaacaaccagcttcagcggtgttattaaatgaagatgaatctttgagtattatgattaatgaagaagatcatgtacgaattcaagcaatgggtaatgatttatctctgatagatttatatcaaaaggcttcagacattgatgatattcttgatgaacaattagaaattagtttcgatgaagatttaggttatttaacgacttgtcctacaaatattgggactggaatgcgagcaagtgtgatgcttcatttacctggattatctataatgaaacgtatgaatcgtattgcacaaacaattaatcgttttggatttacgattcgaggtatatatggagaaggttcacaagtttatggtcatatttatcaaatttctaatcaacttacattaggtaagacggaagaagatattattgatcagttgacagaagtagttcaacaaattattaatgaagaaatgcaaattcgtgaacgtttaacacaatatagtgaattagaaacgcttgaccgtatttatcgttcgttaggaatattacaaaatagccgtatgatatcaatggaagaagcgtcatatagattaagtgaaattaagttaggcatagatttaggatatttaaatttaagtaactttaagtttaatgaattaatggtaagtatccaatctgcgtttttatataatgaggaagatgaaaacgtatctgtaaatgaaaaacgggcaaatatattaagaaaacatacaaattaggaggttgtaaacgatatgttatttggtagattaactgaacgcgcacaacgtgtattagcacatgcacaagaagaagcaattcgtttaaatcattcgaacattggtactgagcacttactacttggattaatgaaagaaccagaaggtattgctgctaaagtacttgaaagttttaatattactgaagataaagttattgaagaagttgaaaaattaatcggtcatggtcaagaacattcaggtacgttgcactatacaccaagagctaaaaaagtcattgaactatcaatggatgaggcaagaaaattgcatcataactttgtaggtacagaacatattttattaggattaattcgtgaaaatgaaggagtagcagcacgtgtatttgctaacttagatttgaatattactaaagcacgtgcacaagtagtgaaagcattaggtagtcctgaaatgaatactaaaaatgcaactgcaaataaatcaaacaacactcctacattggatggactagcacgagacttaacagttattgctaaagacggtactttagatccagttgtgggtagagataaagaaattacacgtgttattgaagtattaagtcgtagaactaaaaataaccctgtacttattggtgaaccaggtgtaggtaaaacagccattgctgaaggtcttgcacaagctattgtaaataatgaagtaccagaaacgttaaaaaataaacgtgtaatgtcactagatatgggaacagtcgtggcaggtactaaatatcgtggtgaattcgaagaacgtttgaaaaaagtcatggatgaaatccatcatgcaggtaatgtcattttattcattgatgaattgcatacactagttggtgctggtggtgcagaaggtgcaattgatgcatctaatattttaaaaccagcgttagcgcgtggtgagttacaatgcattggtgcaacaacattagatgaatatcgtaaaaacattgaaaaagatgctgcattagaacgtcgtttccaacctattcaagttgatgaaccatctgtagaggatactgttgctattctaaaaggtttacgtgatcgctacgaagcgcatcatcgtattaatatttctaatgaagcactggaagcggctgctaaattaagtaaccgttatgtatctgatcgtttcctaccagataaagcaattgatttgattgacgaagcaagttcgaaagtaagactaaaaagtcacacaactccaagtaatttaaaagagattgaacaagaaattgaaaaagttaaaaatgaaaaagatgctgccgtccatgcacaagaatttgaaaatgcagctaacttaagagataaacaatcaaaacttgaaaaacaatatgaagatgctaaaaatgaatggaagacatctcaaggcggacaatcaacatcattatctaaagaagatattgctgaagttattgcaggatggacagggattccattaactagaattaatgaaacagagtcagatcgtttgcttaatttagaagaaacattacatgatcgagtaattggacaaaacgatgctgtaacttctattagtaaagcagttcgtcgtgcacgtgcaggtctaaaagatcctaaacgtccaatcggtagtttcattttcttaggaccaactggtgtaggtaaaactgaacttgcccgtgcattagctgaatcaatgtttggtgaagaggacgcaatgatacgtgttgatatgagtgaatttatggagaaacatgctgtgagtcgtttagttggagcgcctccaggttatgtaggccatgatgatggtggtcaattaactgaaaaagttagacgtaagccatattctgttatcctatttgatgaaattgaaaaagcacatccagacgtgtttaatatcttattacaagtacttgatgatggacatctaactgatacaaaaggacgtcaagttgatttccgtaatactgttattattatgacatcaaatgtaggagcacaagaactacaagatcaacgtttcgctggattcggtggcgcatctgaaggacaagattatgaaacaattcgtaaaactatgatgaaagaacttaaaaattcattccgtcctgagttcttaaaccgtgtagatgatattattgttttccataaattaacaaaagatgaacttaaagaaattgtgactatgatggtaaataaattaacaaaacgtttatcagaacaagatattaatattgtagttactgataaagctaaagaaaaaattgctgaagaaggatatgatccagaatacggcgctcgtccattaattagagcaattcaaaaaacggtcgaagataatttaagtgaattgatacttgatggtaatcaaattgaaggaaaagaagtcacaattgatcatgatggcaatgaattcaagtatgatatccatgataaacaagaaaataatatagaagatacaaaagaaccagcaacagaagaataaaatgagtttaaattcagagtctaggagtcattaaatcctaggctcttcttttcatttatatatatttaaatttgtcattataactggatacatataaaatagatatgttcaaaaaaatcggaggtgcagttttggccaaaaaaaaagtaattttcgaatgtatggcttgtggatatcagtctcctaaatggatgggaaaatgtccaaattgtggtgcttggaatcaaatggaggaaattattgaaaagacttccaatccaaaacatggtgtaaagacaaaagagacacaagcaaaagtacagaaattaaatagtattaagcatgagacaacaccaagagttcaaacggactctaaagaatttaatcgtgtacttggtggcggaattgttagtggatcgctcgtactaattggcggcgacccaggtattgggaaatctacattattattacagatttgtgcatcgttatcacagaaacttaatgtactttatatcacgggtgaagaatcactaaatcaaacgaaattgcgtgcagatcgtctagaggaagactctagtaatttaaatgtactagctgaaacagatttagaagttattcatcaaaccgtggaacaagagcgcccagatatacttgttgtcgattcaattcaaacgatttatcatcctgagattagttcagcacctggctcagtatcacaagttcgagaaagtacacaaagtttaatgaatattgcaaaacaaatgaatatcgcaacttttatagtaggtcacgtaacaaaagaaggacaaattgctggtccaagactattagaacatatggtagatacagttttatacttcgaaggtgatgaacaccatgcttatcgaattctaagagcagttaaaaatcgttttggttcaacgaatgaaatgggtatttttgaaatgaaacaaagtggtttgaaaggtgtacaaaatccttcagaaatgtttttagaagaacgctctacaaatgttccaggatcaacaattgtggctactatggaaggcacacgaccactattgattgaggtgcaatctctagtaacacctactacatttaataatccaagacgaatggccacaggcatcgaccacaatcgacttagtttgcttatggctgttttagagaaaaaagaaaattatcttttacaacaacaagatgcttacattaaagtagcgggtggagtgagactgactgaaccggctgtagatttaagtattattgtagcgactgcttcaagttttaaagataaagccgtagatggtttggattgttatattggtgaagtgggattaactggtgaagtaagacgagtatcgcgtattgagcaacgtgtacaagaagcggcaaaactaggatttaagagagtgattattcccaaaacgaatataggtggatggacattcccagaaggtgttcaggtcgttggcgtgacaacggtacatgatgccttaaaatatgcgtttagtaatcgctcatcataggcatttaaaggggtgataacgtatgaaggtattaaaaggaattgttattataatctacatcattcttggtgcatcatttggaatcatgttaattccagaaattttaaatgatttaggtatgaacaccccacccatttatactaatcattatattgatggtttagtagggatgattgtattctttctaatatttggtctatttattaataaagtaacacgattacttaaagaagctgaaatgtggattatgaaacgtagtgcagtcgaaattttgtttgctacactaggattagtcgttggtttatttatttcagtaatggcttcatttattttagaaatgataggaaattctatattaaatcaccttgtgcctattattattacactattattatgttatttaggattccagtttggtttgaaaaagcgtgatgaaatgcttatgtttttgccagaaaatatagcacgttcaatgtctaaaaataatatcagtgctatacctaaactgttagatacaagtgcaattattgatggaagaattttagatattattaaatgcgggtttatagatggagaaatacttattcctcaaggagttataaatgaattgcaagtagttgcagatgctaatgatagtatcaaacgtgaaaaaggacaacgtggattagatattttaaatcaactttatgatttagactatccaactcgtgtgattcatcctcaaaaatctcatagtgatattgacaaactgttagttgaattagctcaagtctatcatgcccatgtcattacaaccgatttcaatttgaataaggtatgtcatgttcaagggattactgcattaaatgttaatgatttatcagaagcaattaaacccaatgttcatcaaggtgaccgacttaatattttattaactaaaatgggtaaagaacctggccaaggggtaggatatctagatgatggaacaatggttgttgtagatcatgccaaatctcttatagggaaacaggttgaattagaagtcattagtttattacaaacatcatctggtcgtattatatttgctaagactatagaggagtccttaagttaataggaaaaagagtttcatgtgaaacgtagtcattgatgaattattgtataatatttttcgttatgagatattgctgagtaacgtaacaacagtagcaatagacttatcaaaccagccaattaatgctacaataataaggaaatgcgaagttgatttaagtatagattagaagttaaagttattcaaaaacgactctttaaagattgtttgggataacttttttctaatgaaagaaatcattcgctataaagaatgaataacaaaattaggagtgaaacgaatgagtgaacgcgtaagagtaagatatgcgccaagtccaactggatatttacacatcggaaatgcaagaactgcattatttaattatttatttgctaaacattatgatggagattttgtagtacgtattgaagatacagatagtaaaagaaatcttgaagatggagaatcttcacaatttgataatttaaaatggttaggattagattgggatgaatctatcgataaagacaaaggtcatggtccttatcgtcaatctgaacgtgcagacatctataatccacttattcaacaattattagatgaagataaagcatacaaatgctacatgactgaagaagaattagaagaagaacgtgaagctcaaattgctcgtggagaaatgccacgatatggcggtaaacatgcacatctcacagaagaacaacgtcaacaatttgaagctgaaggacgcaaacccgctattcgtttccgtgttccaaaagataaaacatatacatttgatgatatggttaaaggagaaatttcttttgactctaataatattggagattgggttatcgtgaaaaaagatggcgtccctacgtataatttcgcggtagcagtagatgatcactacatggaaatttctgatgttattcgtggagatgatcatgtatcaaatacacctaagcaattaatgatttatgaagcatttggttgggaaccaccacgttttgcgcatatgtcattaattgtaaatgaacaacgtaaaaaattaagtaaacgagatggccaaattttacaatttatcgagcaatatcgtgatttaggttatttacctgaagcgttattcaattttattgctttactcggttggtctcctgaaggtgaagatgagatcttttctaaagaagaatttattaagatttttgatgaacaacgtctttctaaatctccagcaatgtttgatagacaaaaattagcttgggttaacaaccaatatatgaaaacaaaagatacagaaacagtatttgagcttgctttaccacacttgatcaaagcaaatttaattcctgaaaatccaagtgaagaagataaagaatggggacgtaaattaattggcctttatcaaaaagaaatgagttatgcaggagaaattgttccgttatcagaaatgttcttccatgatatgcctaaattaggtgaagaagaacaagaggtattaaatggcgaacaagttcctgaattaatgtctcatttatatggtaaattagaagcgcttgaaccatttgaagctgctgaaattaaaaaaacgattaaagaagtacaaaaagaaactggtattaaaggtaaacaattatttatgcctattcgtgtagcagtgactggtcaaatgcatggtcctgaattaccgaatacaattgaagtattaggaaaagaaaaagtactatctcgtttaaaaaaatatgtttaaaacaatgttaatataataagtcagacacacatgtttaaacttgaaattttataaaaaacttcttatgataagattaaacatatgttagttaaaggattagtaaatatacgataatgttgttagagagtatgcggttgctgtgagcatatcattatctatatcgaatgcacctttgaatgttcaattaaatatagaaatgagtatgataaggtagactagtatgttcatcaacttactttatctaaaatgaagagtggaaccgtgcaatagcgcctctagcagttaatgttaggggtgctttttttaaatatttgaatgatacatggactgtaagatattcataatatatagaaaatggggaggcgagcgtcttgataaaaagaatgaaagatgatgtaaaaatggtatttgaacaagaccctgcagcacgtacaacatttgaagtaatcacaacttatgcaggcttgcatgcggtatggagtcacttaattgcacataaattatataataaaaaacactacgttttggcgagaatgatttcacaagtatctcgcttttttacaggaattgaaattcatcctggagcgaaaattggaaaacgtctatttattgatcatggtatgggtgtagttattggtgaaacatgtacgattggagataacgtaacgatttatcaaggcgtgacacttggaggtacaggtaaacaaaaaggaaagcgtcatccagatattggagataatgttttaattgcagcaggatcaaaggttttaggaaatatccaaattgattctaatgttaatattggtgcgaattcagtagtcttacaatctgtgccaagttatacaacagttgtaggcattccaggtcatattgttaaacaagaaggaaaacgaattgggaaaacatttgatcatcgtaatttgcctgatcctttatttgaacaaattaagcaactagaacgacaattagaaaaagctaagaacggagagattaaagatgattacattatataatactttaacacgtcaaaaagaggcgtttaagcctattgagcctggtaaggttaagatgtatgtatgtggacctacagtatataattacattcatatcggtaatgcccgtccagcaattaattatgacgtcgtacgtcgatattttgaatataaaggctatacggttgattacgtatctaattttactgatgtagatgataaactcattaatcgttctaaagaattaaatgaaagtgtgccagaaattgctgatcgatatatcaaggcattctatgaagatgtaggggcacttaatgttaaaagagcgacatctaatccacgagtaatgaatcatatggatgaaatcattgacttcattaaacaacttgtagatgacggttatgcatatgaaagtaatggagatgtgtattttagaacccgtaaatttgatggatatggtaaattaagtcatcagtctattgatgatttaaaagttggcgctcgtatagaagcaggtgaacaaaaagaggatgcattggattttacgctatggaaaaaggcaaaacctggagaaattagttgggagagcccatttggacaaggacgtccaggatggcatattgaatgctctgtaatggcttatcatgaattgggaaaaacaattgatatccatgcaggaggatcagacttacaatttccacatcatgaaaatgaaatagcgcaatctgaagcacataatcacgcgccttttgctaattattggatgcataatggttttattaatatagataatgaaaaaatgagtaaatcattaggtaactttattttagtacacgatattattaaagaaattgatccagatgtattacgtttcttcatgattagtgttcactatagaagtccaatcaactataacgttgaattagtgaatgctgctaaaagtggattagagcgtatacgcaatagttatcaattaattaaagaaagagaagcaatcgcaactgatttagaaacacaaacagactatattgatcaaattaatgatattttaaaacaatttgaagctgtaatggatgatgattttaatacagcaaacgctgtaactgcatggtatgatttatcaaaattagctaataaatatgtgttagaaaatacaacatcaactaaagtgattcagcgctttaaagaagtatatcacatttttagtgacgtattaggcgtaccattagaaggaaaagaaaatgatgtattacttgatgaagacatagaaaaacttatcgaagaacgtaatgaagcacgtaaaaataaagattttgctcgagctgacgaaattagagatatgttaaaagaacaaaatattattcttgaagatacgcctcaaggtgtaagatttagaaggggttaatatgaatgccaagctactaaacccattaacgttagcttatatgggagatgctgtattagaccagcatgtacgtgaatatattgtgcttaaattacagagtaaaccgaatcgcttacaccaagtatcgaaacaatatgtgtctgcaaaaagccaagcacaaacgcttgaggtattaatcacaaaagaatggtttactgaagaagaacgagatattgttagaagagggcgtaacgctaaaagttatacgaaagctaaaaatacagatatacaaacgtatcgtaaaagttcaggtttagaagctattataggatttctttatttagaccatcgaaatgaacgattagatgcgttacttgatatgattgtacaaattgttgatgaaaggttgtgaacatagtggaagatatcgttattgtcggtagacacgctgttaaagaagcaattgtgtctggtcatacaataaataaaatttggatacaagaaggaataagaaagcagcaaattaatgatattttaaaaaatgctaaagtacagaaattgattatacaaactgttccaaaatccaaattagataatttagcaaatgcacctcatcaaggtgtagctgcactgattgcaccatacgaatatgcagattttgatcagtttattcaatctcaaaaagaaaaagaaggcctttctacaataattattttagatgggttagaagatccacataatcttggttcgatcattagaacggcagatgcaagcggagtagatggagtgattatccctaagagacgttctgttgcgctcacacaaactgttgcaaaagcgtcaactggtgcgattcaacatatcccagtgatgcgtgttacaaatttatcaaaaacaattgatgagttgaaaaataatggatattgggtagcaggagctgaagcggataatgctacagattatcgcaatatggctgctgatatgccactggctatcgtaattggtagtgaagggcaaggtatgagtagattggttaaagataaatgtgatttctatattaaaattcctatggtaggccatgttaatagcttaaatgcttctgtagctgctagtttaatgatgtatgaagtatatcgtaaacgatatcaaattggagatacccaatgaaagatagatatctaattattgatggatacaatatgattggtcaatcaagggaattgagtaaagtagcaagagaaagtttagaggaagcacgtgaacaactcttagatgtgattgccaattacaatgcagttgtcgccgatgagattgtatgtgtatttgatgcatatgaacaatctggtatagaaagagaatacatttatcatggtgttaaaacagtttttacgaaagaaaaagaaactgcagatagctatattgagcgttatgtatacaatttatacaataaacatacgacacatattacagtagtgaccagcgatatgagcgagcaacatgctatttttggagcaggtgcatatcgtgtttcatctagagaaatgtggcgagatttaaaagagaatgcaatgacggttagtaaatcagtagatgattttaatgaacgtaaaccaagaactcgaatttcgttatcaaaagatgtacttgcagaatttgaaaaaatacgacgaggatatggtaaaaaacgtaaataatacagtcttgctattcaaaagatgcgtcttatacaatgtgcctaacttataaagaaaggttttgtatatgacttattattttcgacaactagaagatatatttaaagcttttcaatatagccaaaatacattggagaaagaacagttattcgcaaatataatgaatgtgatacgtcctaaacttatgatgaagtttaggatgctagatatagatcatcaagaactagaagatttaattcaagatacctcgttaaagatatatttagctttacacacatttaattttaatacgaatgttccattcgaacattatttaaatcgtctagtttattctgtgaaaaaagatttttggagaaaacgttatgcgtttaatcaacgtcaacaattgttaatcaatgaatgtgtagtagaatctcgtttgaatcaaatgataaaaaggacggaagaactatatttaactaggtcaagtaaagaagacttgatagacagttttaagaagttaagtatgtttgaaagagaagttgcaaatttacttctactggattattccccatcagaaatagcaaaaaaactaaatgtaaaagataaagtagtttacaatagtattcaacgttgtaaaataaaaatgaaacaatatttattgaaatacaaacgttaagtattttagtacgagtttgacagtttattataagtttatgtatagtagactggtattaatatgagtaaaggtgaattgatgtgagaaaagtacctttagtttgtgaaatgtgtggtagcagaaattataatgtacctaaaaaagaaacatcagctaagagattacaactgaagaaatattgttccagatgtaatgaacacacgatgcataaagaatcaaagtaatgagtttataagtatatactttgaaaagcatggaggtaaggttatggctaaagataaagacgcaagtaagaataaagaaagtttcttccaaggcgttaaaagcgaaatggaaaaaacaagttggcctacgaaagaagaactttttaaatatactgtcattgtagtagctacagtaattttctttatggtctttttctgggtattagacgtaggtattggtaatttaattcaattatttagataaaagtaaggagtgacaacatgtctgaagaagttggggctaagcgttggtacgcagtgcatacgtattctggatatgaaaataaagttaaaaagaatttagaaaaaagagtagaatcaatgaatatgacagagcaaatttttagagttgtcatacctgaagaggaagaaacacaagttaaagatgggaaagcaaaaaaacaggttaaaaagacatttcctggatatgttttagtagagcttattatgacagatgaatcatggtatgttgtacgtaatactccaggtgtcacaggatttgttggttcagcaggtgcaggttcaaaacctaatccattacttcctgaagaaatgagattcatcttaaaacaaatgggacttaaagaaaaaacaattgatgtagaattagatgtaggtgaacaagtccgcatcaaatcaggaccatttgcaaatcaagttggtgaagttcaagaaatcgaagcagataaatttaaattaactgtattagtcgatatgtttggtagagaaacaccagttgaagtagaattcgatcaaatagaaaaattataatcattttaaattataaagtatgatttgcttaaaaagatgaaattttactattgatttttaattaagtttaatgttaaaataatgtggtcgcgtttttagaacgctcatttcgtcacgaaatgtttatgagtgggagggcaaaactgagccctgtgaccacatcacgatatcaaggaggtgcacatcgtggctaaaaaagtagaaaaagtagttaaattacaaattcctgcaggtaaagcgaacccagcaccaccagttggtccagcattaggtcaagcaggtgtgaacatcatgggattctgtaaagaattcaatgcacgtacacaagaacaagcaggtttaatcattccggtagaaatcagtgtatatgaagatcgttcatttacattcattactaaaactccaccggctccagtactacttaaaaaagcagctggcgttgaaaaaggttctggtgaaccaaacaaaactaaagttgctacagtaactaaagatcaagtacgtgaaattgctcaaacaaaaatgcaagacttaaacgctgcagacgaagaagcagctatgcgtattatcgaaggtactgcacgtagtatgggtatcactgtacaataattattaaatgaaaatgagtttgaatttgaaataaactgatagacgatagcaggtaacagaaacgacaacatatattgtctatgattagtctttagtaaattaatatttattaatgacatcatctgttatctgctcttaacttgtgtaaatcacacaagtaagcgtgggaggaaattccgctaaaaccactaaaggaggaacaataaatggctaaaaaaggtaaaaagtatcaagaagcagctaataaagttgaccgtactaaatactatagtgttgaagaagcaattaaattagctaaagaaactagtatcgctaactttgatgcatcagttgaagtagcattccgtttaggtattgatacacgtaaaaatgaccaacaaatccgtggtgcagtagtgctaccaaacggtactggtaaatcacaacgtgtattagtttttgctaaaggcgataaaattacagaagcagaagaagcaggcgcagattacgtgggtgaatctgaatatgctcaaaaaattcaacaaggttggttcgactttgacgtagtagtagctacacctgacatgatgggtgaagttggtaaattaggtcgtgtattaggacctaaaggtttaatgccaaaccctaaaactggtacagtaactatggacgttaaaaaagctgtagaagaaattaaagctggtaaagttgaatatcgtgctgaaaaagcaggtatcgtacatgctacgattggtaaagtatctttcgacgaagaaaaattagttgaaaactttaatgctttacaagatgttttagctaaagctaaaccagcatctgctaaaggtacttacttcaaatctgttgctgtaactacaacaatgggtcctggagttaaagtagatacttcatcttttaaactttaatttcaaatatatgaatagattgtagactggtagataatcattgcttattttgaaaaagataagatcattttcttccagtctttttttaaaaaacaattgacatattacaataaacaagttatattatttattgtgattattttacctaagacagtaggagttaatctttaacttaaaacaatatcctaccgaggctaaaattgacttgaacgtgatgattattataatgatctttcaagcactttttgccgtgggtagaaagtgctttttttattaaaaaagcaccaaaaataaaaatggaggtgtctgaatgtctgctattattgaagctaaaaaacaacaagttgacgttatcgctgaacaacttaaaaattcagtttcaactgttatcgtggactaccgtggtttaactgttgcggaagtaactgatttacgtgctcaattacgtgaagctggtgttgagtataaagtatacaaaaacacattagttcgtcgtgcagctgaaaaagcaggtatcgaaggcttagatgaattcttaactggtcctacagctatcgctacaactactgatgatgtagttgctccagcgaaagtgatctcaggatttgctaaagaacatgaagctttagaaattaaaacaggcgttatggaaggtaacgttatctcagcagaagaagttaaaactgttggttcattaccttcacacgatggtcttgtatctatgcttttatcagtattacaagctccagtacgcaacttcgcttatgcggttaaagctgttggagaacaaaaagaagaaagcgctgaataattgcgcataaaattttaaaataaatggaggaataataaaatggctaatcaagaacaaatcattgaagcaattaaagaaatgtcagtattagaattaaacgatttagtaaaagcaattgaagaagaatttggtgtaacagcagcagctcctgtagcagcagctggtgcagctggtggcggagatgctgccgcagaaaaaactgaatttgacgttgaattaacttcagctggatcttcaaaaatcaaagttgttaaagcagttaaagaagcaactggcttaggcttaaaagatgctaaagaattagtagacaacgctcctaaagtaatcaaagaagctgttgctaaagaagatgctgaaaaacttaaagaacaattagaagaagttggagctactgtagaattaaaataattctagtatcttaacttaatatataagtaaatcattttaacttagtcactttagagtgaaagcgttaatgattacttgcattctttgagaaattaaaaccccgttattgttgataacggggttttaattcattttctaatcaaatagatgaacaaataaagaggtgaaatcatgagtcactattatgatgaaaatcctgaagtacaaagtgatgaaaaaacaattcaatacttttatcataaatctcagttaaaactaacgacagatgcgggcgttttttcaaaaggaaaagtagactttgggtctgatttattagtacaaacgtttttaaatgaacatccaccaggtccaagtaaacgtatcattgatgttggctgtggttatggtccaattggtttaatgattgctaaagtgtcaccacaccatcaaattactatggtggatgtgaaccatcgagctttacatttagctgaaaagaacaaaaagcaaaatcaaattgataatgttatcattacagaaagtgatggtctgtcacaagttgagaatgaatactttgactttgtattaacaaatccgccaattagagctgggaaaaatgttgttcatcgaatctttgaagaagcatatcaaaagctaaaaaatcaaggtgaactctatgttgtcattcagaaaaagcaaggtatgccttctgctaaaaagaaaatggaagaaatatttaataatgtagaaactgtgaacaaaagtaaagggtactatatactgaagagccaaaaaggttgatttcaaaatggtattctgatatagttataaaatgtaaaaatttatgttcaacaagtgtgtacttttacgcaaaatgagtacgataaacaagaataagaaaagaatcgaaaatggtgtcatcaattgtgttgccgttttctttttgtcttgttatgtgaaattttgtgtataagttcaacacaatatttgaggggtgaatctgtttggcaggtcaagttgttcaatatggaagacatcgtaaacgtagaaattatgcgagaatttcagaagtattagaattacctaacttaatagaaattcaaactaaatcttatgactggttcttaaaagaaggtttattagaaatgttccgtgatatttcaccaattgaagatttcactggaaacctatctttagaatttgtggattatagattaggtgaaccaaaatatgatttagaagaatcaaaaaaccgtgacgctacttatgctgcacctcttcgtgttaaagtacgtctcattatcaaagaaactggtgaagttaaagaacaagaagttttcatgggtgacttcccattgatgacagatactggtacgtttgtaattaatggtgcagaacgtgttatcgtttcacaattagtacgttcaccatcagtgtattttaatgaaaaaatagataaaaatggacgtgaaaattacgacgcaacgattattccaaaccgtggtgcgtggttagaatatgaaacagatgctaaagacatcgtttacgttcgaattgatagaacacgtaaattacctttaacagtattattacgtgctttaggattctctagtgatcaagaaattatcgatttactaggagacagtgaatacttacgtaatacgcttgaaaaagatagtactgaaaatactgaacaagctttattagaaatctatgaacgtttacgtcctggtgaaccaccaacagttgaaaacgcaaaaagcttattatattcacgtttcttcgaccctaaacgctatgatttagcaagtgttggtcgctataaaacaaataaaaagttacacttaaaacatcgtttatttaaccaaaaattagcggaaccaatcgttgacagcgaaacaggtgaaattgttgctgaagaaggaacagttttagatcgtcgtaaattagacgaaattatgaatgttttagagtcaaatgcaaacagtgaagtgttcgagttagaaggtagcgttattgatgaacctgtagaaattcaatcaattaaagtgtatgttccaaatgatgaagaagaacgcactacaacagtgattggtaatgcattacctgattcagaagtgaaatgtattacaccagcagatattattgcctcaatgagttatttctttaacttattgaatggtattggttatacagatgatattgaccatttaggtaatcgtcgtttacgttcagtaggtgaactgttacaaaaccaattccgaattggtttatctagaatggaacgtgtcgttcgcgaaagaatgtctattcaagatactgattcaattacaccacaacaattaattaatattagacctgtaattgcttcaattaaagaattctttggtagttctcaattgtctcaattcatggaccaagctaacccattagcagagttaacacataaacgtcgtctttctgctttaggacctggtggtttaacacgtgaacgtgcacaaatggaagttcgtgacgtacactattctcactatggtcgtatgtgtccaattgaaacaccagagggaccaaacattggtttaattaactcattatctagttatgcacgtgtaaatgaatttggttttatcgaaacaccatatcgtaaagtagatattgataccaattcaattactgatcaaattgattatttaactgctgatgaagaagatagctatgtagttgcacaagccaattctcgtttagatgaaaatggtcgtttcctagatgatgaagtggtatgtcgtttccgtggtaacaacactgttatggcaaaagaaaaaatggactacatggatgtatctcctaaacaagtagtatcagcagcgacagcttgtattccattccttgaaaacgatgactctaaccgtgcgttaatgggtgcgaacatgcaacgtcaagcagtaccattgatgaatcctgaagctccatttgtgggtacaggtatggaacatgtggcagctcgtgactctggtgcagcaattactgcaaaacatagaggtcgtgttgaacacgttgaatctaatgaaatcttagttcgtcgtttagttgaggaaaatggaactgaacatgaaggcgaattagatcgttacccattagctaaatttaaacgttcaaactctggtacttgttataaccaacgtccaatcgtttctgtaggtgacgttgtagaatacaatgaaattttagctgatggtccttcaatggaattaggagaaatggcattaggtcgtaacgtcgttgtaggtttcatgacttgggacggatataactatgaggatgccgttatcatgagtgaacgattagttaaagacgatgtatatacttcaattcatattgaagaatacgaatctgaagcacgtgatactaaattagggcctgaagaaattacacgtgatattcctaacgtttctgaaaatgcacttaaaaacttagacgatcgtggtattatatacgtcggtgcagaagttaaagatggagatatcttagttggtaaagtaacgccaaaaggtgtcacagaattaactgcagaagaacgattattacacgccatctttggtgaaaaagcaagagaagttcgtgatacttcattacgtgtcccacatggtgcaggtggtatcgttctagacgttaaagtatttaatcgtgaagaaggcgatgatacgttatcaccaggtgtgaaccaacttgttcgtgtatatatcgttcaaaaacgtaaaatccatgttggggacaaaatgtgtggtcgtcatggtaacaaaggggttatctctaagattgttcctgaagaagatatgccttacttaccagatggacgtccaatcgatatcatgttaaacccactaggtgtaccatcacgtatgaacattggacaagttttagagttacatttaggtatggctgctaaaaacttaggtattcatgttgcttctccagtattcgatggtgcaaacgacgatgatgtatggtctacaatcgaagaggctggtatggcacgtgatggtaaaacagtattatatgatggacgtactggtgaaccatttgataatcgtatttctgttggagtaatgtatatgcttaaacttgctcacatggttgacgataaattgcatgcacgttcaactggaccttactcacttgttacacaacaaccacttggtggtaaagcacaattcggtggacaacgttttggtgagatggaggtatgggcacttgaagcttatggtgcagcatacacattacaagaaatcttaacttataaatctgacgatactgtaggtcgtgttaaaacatacgaatctatcgttaaaggtgaaaacatttcaagaccaagtgttcctgaatcattccgagtattgatgaaagaattacaaagtttaggtttagatgtaaaagttatggatgaacatgataatgaaatcgaaatggccgatgttgatgatgaagatgcaactgagcgcaaagtagatctacaacaaaaagatgttccagaaactcaaaaagaaactaacgaataataaaattatagatttaagatgaataaacatgagatgcgtaattttaatctcatcaagatttagattgcgcactgatgtgcatcttatgtatgtgatgtcagtttcagtaaatgtaaatcaatcaaatagcacagctaatctaaattgaaggaggtaggctccttgattgatgtaaataatttccattatatgaaaatcggtttagcctcacctgaaaaaatccgttcttggtcatatggtgaagtgaaaaaaccagaaacaataaactatcgtactttgaaacctgagaaagatggtcttttctgtgaaagaatttttggacctacaaaagactgggagtgtagttgcggtaagtacaaacgtgtacgctacaaaggcatggtttgtgaccgttgtggtgtagaagtcacaaaatctaaagttcgtcgtgaaagaatggggcatattgaattagcagcacctgtttctcacatttggtactttaaaggtattccaagtcgcatgggtcttttattagatatgtctccaagatcattagaagaagttatttattttgcttcttatgtggttgtagatccaggtccaacgggattagagaaaaaatcattattatctgaagctgaattcagagaatattatgataaatacccaggtcaatttgtagcaaaaatgggtgcagaaggtattaaagacctattagaagaaattgacttagatgaagaattaaaagcattacgtgatgaattagaatcagcaactggacaaagattaacacgtgcaattaaacgtttagaagttgtggaatcatttagaaattctggaaataatccttcatggatgattttagatgtactaccaattattccaccagaaattcgtcctatggttcaattagatggtggacgttttgcaacaagtgatttaaatgatttatatcgtcgtgttattaaccgtaataatcgtttgaaacgtttattagatcttggtgctcctggtatcatcgttcaaaacgaaaaacgtatgttacaagaagcagtagatgcattaatcgataatggtcgtcgtggtcgtccagtaactggtccaggtaatagaccattgaaatctttatcacatatgttaaaaggtaaacaaggtcgtttccgtcaaaacttacttggtaaacgtgttgactactcaggtcgttcagttatcgcggtaggaccaaacttaaaaatgtatcaatgtggtcttccaaaagaaatggcacttgaattatttaaacctttcgttatgaaagaattagtacaacgtgaaatcgcaacaaacattaaaaatgcgaaaagtaaaattgaacgcatggatgatgaagtatgggatgtattagaagatgtcattaaagaacacccagtattacttaaccgtgccccaacgcttcacagattaggtattcaagctttcgaacctactttagtagaagggcgtgcaatccgtttacatccacttgtaacaacagcttataacgctgactttgatggtgaccaaatggcggtacacgtaccattatctaaagaagcacaagctgaagcacgtatgttaatgttagcggcgcaaaatatcttgaaccctaaagatggtaaaccagttgttacaccatcacaagatatggtattaggtaactattacttaactttagaacgtaaagatgctgtaaatactggtataatctttaatgatacaaatgaagtacttaaagcatatgcaaatggttatgtgcatctacacactcgtataggtttacatgcacgttcacttaataatcctacatttacagaagaacaaaataataaaattttagctacttctgtaggtaaagtgatctttaatgaaatcattccagattcatttgcatatattaatgaacctactcaagaaaacttagaagataaaacacctgataaatattttgttgatccaacacaattaggtgaaggtggtcttaaagcttacttcgaagagcaagaacttactgcacctttcaacaaaaaattcttaggtaatattattgctgaagtatttaacagatttagcatcacagatacatcaatgatgcttgaccgtatgaaagatttaggattcaaattctcatctaaagctggtatcacagttggtgtatctgatatcgtagtacttccagataaacaacaaattttagatgaacatgaaaaattagtagaacgtgtatctaaacaatttaatcgtggtttaatcactgaagatgaacgttacaacgcagttgttgaaatttggacagatgctaaagatcaaattcaaggcgaattaatgcaatcacttgaaaaaacaaacccaatctttatgatgagtgactcaggtgcccgtggtaacgcatctaacttcacacaattagccggtatgcgtggattaatggctgcgccatcaggtaaaattattgagttaccaattacttcatcattccgtgaaggtttaacagtattagaatacttcatctcaacgcatggtgcgcgtaaaggtcttgccgatacagcacttaaaacagctgattcaggttatcttactcgtcgtcttgttgacgttgcacaagatgttatcgttcgtgaagaagattgtggtacggaccgtggtttattagtttctgatattaaagaaggtacagaaatgattgaaccatttatcgaacgtattgaaggccgttattctaaagaaacaattcgtcatcctgaaacgaatgaaatcattattcgtcctgatgaattaatcacacctgaaattgctaagaaaattacagatgcaggtattgaaaaaatgtatatccgttcagcatttacatgtaatactcgtcatggtgtatgtgaaaaatgttacggtaaaaaccttgctacaggtgaaaaagttgaagtaggtgaagcagttggtactattgccgctcaatcaattggtgagcctggtactcaacttacaatgcgtactttccatacaggtggggtagcaggaagcgatatcactcaaggtcttcctcgtatccaagagatctttgaagcacgtaaccctaaaggccaagcggtaattactgaaatcgaaggtgtcgttgaagatattaaattagcaaaagatcgccaacaagaaattgtgattaaaggcgctaatgaaacaagatcttatcttgcttcaggtacttcaagaattaaagtagaaattggccaatcagtagaacgtggagaagtattaactgaaggttctattgaacctaagaacttcttagctgttgctggtttaaacgcgactgaaagctacttacttaaagaagtgcaaaaagtttatcgtatgcaaggtgtagaaattgacgataaacacgttgaagtaatggttagacaaatgttacgtaaagtaagaattattgaagctggtgatactaaacttctaccaggttcattagtagatattcataactttactgatgctaatagagaagcgtttaaagaacgtaaacgcccagctactgcaaaaccagtattacttggtattactaaagcatctcttgaaacagaaagcttcttatctgcggcttctttccaagaaactactcgtgtacttactgatgctgctattaaaggtaaacgcgatgacttacttggacttaaagagaatgttattattggtaaacttatcccagctggtacaggtatgagacgttatagtgacgttaaatacgataaagtgggtactccagttgctgaaactgacgaagcagaagtgactgagtaattaatgtgaaagtaacttggaactttaatttgttccaagttcttttcttttaatatttacagaaaatgataaaaaatgttgactaattattatataaagtgttattattgtaaaggttgatgcaagcagaactttggaggatatttaatgtctaatgaaaaagttgcacgctttaacaaacaacattttgtagttggtcttaaacaaacgttaaaagcgttgaaaaaagatcaagttacatcattgattattgctaaagatgttgagatatatttattagctcaagtatttagccaaatcaatcataaaagtataccgattacttatttcgaaagcaaatcggctttaggaaaagcagtaggtattaatgttaatgcgacaattgttgcgttattgaatgagaattagtaagtttttacacttactaaattttatttaacctaaaaatgaaccacctggatgtgtggaattaaaaaatgaagagaggaggacattcaatgccaactattaaccaattagtacgtaaacctagacaaagtaaatctaaaaaatcagattcaccagcgttaaacagaggtttcaatagtaaaaagaaacaatttactcacttaaactcacctcaaaaacgtggtgtttgtactcgtgtaggtacaatgacacctaaaaaacctaactcagcgttacgtaaatatgctcgtgtgcgtttatcaaataacattgaaatcaacgcatacattcctggtatcggccataacttacaagaacacagtgttgtacttgtacgtggtggacgtgtaaaagacttacctggtgtgcgttaccatattgtacgtggtgcgcttgatacttcaggtgtagatggacgtagacaaggacgttcattatacggaactaaaaaacctaaaaattaagtttaagattgtgtaaattttactatcaatttttaagaatatattataataggaagggaggactttataatgcctcgtaaaggatcagtacctaaaagagacgtattaccagatccaattcataactctaagttagttacaaaattaattaacaaaattatgttagacggtaaacgcggaacagcacaaagaattctttattctgcatttgaccttgtagaacaacgcagtggtcgtgatgctttagaagtattcgaagaagctattaacaacattatgccagtattagaagtaaaagcgcgtcgtgtaggtggttcaaactaccaagtacctgttgaggtgcgcccagaacgtcgtacgactttaggattacgttggttagtaaactacgctcgtcttcgtggtgaaaaaactatggaagatcgtttagctaacgaaatcttagatgctgctaataatacaggtggtgcagtcaaaaaacgtgaggacactcacaaaatggctgaagcgaacaaagcattcgctcactatcgttggtaagattaaagctttaaccctgagtgtgttccgtcatattggtttaccaagtaaaatggttcatgcttagggcatcgccatattctatagtacttattcagtaataactggaaggagaaaaacaatggctagagacttttctttgaaaaacactcgtaatatcggtatcatggctcacatcgatgctggtaaaactacaacgactgaacgtattctttattatacaggtcgtatccacaaaattggtgaaacacatgaaggtgcttcacaaatggactggatggaacaagaacaagatcgtggtattacaatcacatcagctgcaacaacagcttcttggaaagaccaccgcgttaacattatcgatacaccagggcacgtagacttcactgtagaagttgaacgttcattacgtgtacttgatggtgcggttactgtacttgatgctcaatcaggtgtagaacctcaaactgaaactgtttggcgtcaagctactacttatggtgttcctcgtattgtattcgttaacaaaatggataaacttggtgcaaactttgagtattcagtaagcacattacatgatcgcttacaagcaaatgcagcacctatccaattaccaattggtgccgaagatgaatttgaagcaatcatcgacttagttgaaatgaaatgtttcaaatatacaaatgacttaggtacagaaattgatgaaattgaaattcctgaagatcacaaagaaagagcagaagaagctcgttctaatttaatcgaagcagttgcagaaactagcgacgaattaatggaaaaatatcttggtgacgaagaaatttcagtagctgaattaaaaaatgctatccgtcaagctactactgacgtagaattctacccagtactttgtggtacagcattcaaaaacaaaggtgttcaattaatgcttaatgcagtaattgattatttaccatcaccattagatgttaaacctatcgtaggtcatcgtgctgaaaatcctgatgaagaagtcattgcaaaagctgacgataatggcgaattcgcagcattagctttcaaagttatgactgacccttatgttggtaaattaactttcttccgtgtatattcaggtacgttaacatctggttcatacgttaaaaactcaacaaaaaacaaacgtgaacgtgtaggtcgtttattacaaatgcatgcgaactctcgtcaagaaattgacactgtttactcaggagatatcgctgcagctgtaggtcttaaagaaacaggtactggtgacactttatgtggtgagaaaaatgacattatcttggaatcaatggaattcccagaaccagttattcacttatcagtagaacctaaatctaaagctgaccaagataaaatgactcaagctttagttaaattacaagaagaagaccctactttccatgcacatactgacgaagaaactggacaagttatcatcggtggtatgggtgagttacacttagatatcctagtagaccgtatgaaaaaagaattcaacgttgaatgtaacgtaggtgcaccaatggtttcttatcgtgaaacatttaaacaatctgctcaagttcaaggtaaattctctcgtcaatcaggtggtcgtggacaatatggtgatgttcatattgaattcactccaaatgaaactggcgcaggattcgaattcgaaaacgctatcgttggtggtgtagttcctcgtgaatacattccatcagttgaagctggtcttaaagatgccatggaaaatggtgtattagctggttatccattaattgatgttaaagctaaattatttgatggttcataccatgatgtcgattcatcagaaatggccttcaaaattgctgcatcattagcacttaaagaagctgctaaaaaatgtgatccagttatcttagaaccaatgatgaaagttacaatcgaaatgcctgaagaatacatgggcgatatcatgggtgacgtaacagctcgtcgtggacgtgttgatggtatggaaccacgtggtaatgcacaagttgttaacgcttatgtaccactttcagaaatgtttggttatgcaacttcattacgttctaacactcaaggtcgcggtacttacactatgtactttgaccattatgcagaagttccaaaatcaattgctgaagaaatcatcaaaaaaaataaaggtgaataatataacttgttttaactagtaaatctaggtaaaatacagcttgagcttattaattaagcattcatctttatgaattgattttttatccaaaatgcattataaaagaactatgaattctttttagaacaatcattatgtctcatgatagtgagtaactatcatgagagataatattgaaataacttaactagaataggagagatttaataatggcaaaagaaaaatttgatcgctcaaaagaacatgccaatattggtactatcggtcacgttgaccatggtaaaactactttaacagctgctatcgcaactgtattagctaaaaatggtgacactgtagcacaatcatatgacatgattgacaacgctccagaagaaaaagaacgtggtattacaatcaatactgcacacatcgaatatcaaactgacaaacgtcactatgctcacgttgactgcccaggacacgctgactatgttaaaaacatgatcactggtgctgctcaaatggacggcgctatcttagtagtatctgctgctgatggtccaatgccacaaactcgtgaacacattcttttatcacgtaacgttggtgtaccagcattagtagtattcttaaacaaagttgacatggttgacgatgaagaattattagaattagttgaaatggaagtacgtgacttattatctgaatacgacttcccaggtgacgacgtacctgtaatcgctggttcagctttaaaagctttagaaggcgatgctcaatacgaagaaaaaatcttagaattaatgcaagcagttgatgattatattccaactccagaacgtgactctgataaaccattcatgatgccagttgaggacgtattctcaatcactggtcgtggtactgttgctacaggccgtgttgaacgtggtcaaatcaaagttggtgaagaagttgaaattattggtatcaaagaaacttctaaaacaactgttactggtgtagaaatgttccgtaaattattagactacgctgaagctggtgacaacatcggtgctttattacgtggtgttgctcgtgaagatgtacaacgtggtcaagtattagctgctccaggttcaattacacctcacacaaaattcaaagcagacgtatacgttttatcaaaagatgaaggtggacgtcatactccattcttctctaactatcgtccacaattctatttccgtactactgacgtaactggtgttgttaacttaccagaaggtactgaaatggtaatgcctggcgacaacgttgaaatgacagtagaattaatcgctcctatcgcgattgaagacggtactcgtttctcaatccgtgaaggtggacgtactgtaggatcaggcgttgtaactgaaatcttcgaataatttattatttgatatggaagactcccttagtgggggtctttttttatttgaaaataagacgtaagttcactttgctttaatttagtaaaaaatattaataaaacagcccatagataaatactatctatgagctgtttcaatcgtttattttctaagatttacgatacatatttaacaatgaattaaaaaacgctttcaagttctaagattttaagaaattcacttgcagcatatttaaatgctgcttcatcaatatcaaaatgaggattgtgatgtggggctgtaatacctttatcagcattgccacatccagttaagaaaaatgcaccaggtcggacttttagatagtgtgaaaagtcttcaccaatcatcatcagttctgatttattaaaacgtaaatgtaaatcatttgccgcttgtttaactgtttcataagctgcttcatgattatgaactggtaaataccctctaatatactccatgtcataagtgatatcattcgctaatgcaagaccttgtaataacttatccattttctcttgaacatgagcttgtagttttgtatcaaaggtacgtacggtccctttacaaaatgctgaatctggaataacactatcagaagaacctgcttgtaccataccaaaggttaatactgcttcttttacaggatcaatggtacgagaaatgattttttgagcacttagtataaactcagccataattacaattggatcaattgtttcatgaggtttagcgccatgacctcctttacctttaatggtaatcgagaattcatctggagaagccatgattgcacctggtcttgaataaattgtaccagtaggataaccactccaaagatgagtaccataaattttatcaacatcgtttaaacagccatcatcaatcatttcttgagagccacctggcataatctcttcaccatattgaaaaataaatacaacatttccttttaataagtgacgatgttcgtgaacaatttcagcaacacctaataaaatagcagtatgaccatcgtgtccacatgcatgcataaaaccatcgtttttagatttatatggaacttcgtttaattcttggactggtaatgcatcgaagtctgcacgaaatgcaatagttgggccattttcttttcctttaaaagttgctttgataccatttcgtcctacaggtgacacaatctcacagtctaaatgacttaactgattgagaatgtagttatgtgtccacgtttcttcaaatgaaggctctggatattgatgcatataacgacgcatttgaatcattctattttctttttcactggctaattgaaaccaatcaaacacattgaccacttcttcctaattattatgaactttagtataacaaattctacttaaactcagtagtcactcattataattttaataaaagatacactaccaggtattaaatgaatgaattatcttataatataaaatgatgatgaatcaataataaaagagaaatgatgagacacatggttttgtgatagataaaggtgcaggaatagtaaaacatttagacttacaagacaaaattgatttccaaatcggtacattatctaaagctatcgatgtcgtaggtgattatgtcgcacgcactaaaaaatgttagatcaagcacttaaagtattaaaaagttggaaaaggttaaatagtattaaataaacatttaattaatttgagtcatctattagtttaaatgtataaatggattgtttttcatttttagtggtacactaattgtaaaaaaagaggtgtatacatgcttgaattaagaaaactagagtataaagataaagaaagtttaattcgatatttacaatattggtatgacaacaatgagaaaattgttccatctaatgtcgatgtcgcacattatcaatcttttcaacaaatggtcgaacaattgaatcatccacccgtaaatatgaataccgttccttctacaacattattttattttaaaaatgatgatattgttggtgcagtaaatattcgtcatgaacttaatgataaattaaaaaacattggaggacatgtaggttatggcgtcgccaaaccatacagaggaaatggttatgcttcaagcatgttagaagaagcactaaatagactaaataaaatggggatacataaagtattgatgacatgtaatccttataattatgcttcacaaaaagtaataaaaaaacatggaggatatgaaattaattcgtacattaaaaaaaacggccagccagtaagtcgatttgaaattccaaatgatggaaggtgaaactgtgaaagatttaaaagtcgtatatgcgctcatacaaaatcaagaaagaaaagtattacttgttaataatacagatggcggggggtggtcattaccaggaggaaaggtagaaaaggaagaaacgctaattgaagctatgaaacgtgaagtaatggaagaaacaggtcttaatgctaagattggagatatcgtaagtattaatgaaggtaaatcaactcaaatgaatgtacacacattatttattatgtttaaagctacaattaaaaatgaagtcatagatatacaaatgaaagatgaaatttcagaaacaaaatggatgaccatcgaagaagcagatcaaaatcttacatactataatcacagtttaaaagtatttttaaataataaagctacctattataatgaaggtgttatagattgaaacaaaggtattatagcaatcatttataggaagatataaaaaaatcacttttctcataagaaaagtgatgggtgtcaaaagtttatgaatagtttcatattgttatgaaatcgcaaggcactttattatataaactgtaccttttatttataatataaagacatcatcaattttatatcatcacaataataagttaataaaatctataaaaaatattaatattcagtggattagaatatataatgattaaattgaatgattgttacttctaatctatcatttaacaatatccaaatagtggaggtctatgaaatgatcgttttaaatgaacaagatcaacaaaacttattagatatgaaagaagtgattgaagaagtcggtcatgcgttacaggtgttttcagaaggaaaaactgaaacgccattacgttatgtgttaccttttaataaagaaaatagatatttagtgatgccagctttatcagatgaattaaatattgtcggtattaaaacagtcactttcgcacctaataattctaaactagataaaaaaacaattactggatcagtcttgctgagcgattatgatacaggagaaacccttgctgtacttgatggtagttatttaactaagattcgtacaggcgccatttctggtgtagctacaaaatatttagcgcgtgaaaatgcaaaaacattgtgtgtgattggcgctggagatcaagctgaggggctcattgcagcaatattagcagtgagagatattgaaatgcttcatatctcgagtcgtacaagagataaagctgaaacattggctgaatttgtgaaacaaacgtatcacgtgtcaacaaaagtcttcgatgaagcagatcaagccatggaaaacgcagatattgttgtgacagctacaaattcaaataaaccggtgtattctcattcattacatcccggtgttcatttaaatgcagtaggttcatttaaacctgaaatgcaagaactaccttcagaaacgatgttgattgctaataaaatagttgttgaatctacagaagcagcaatggaagaaacaggtgatttaaaagtaccattagaagaaggcatccttactgagcgatcattacatggtgaactaggagatatcgtaagtggaaaaatatctggacgtgatgatgaagaagaagtgacagtatttaaatcagtaggtttagctattgtagatatagtagtggcacaatacttttataaaaaagctcaacaaactaattaaccctatactgtataaaacatagataccgtatcagtgataacgtagacatggctgatacggtatttttatttaaatattatgctgattttttacgttgacgaagatatatcaatccagcacctgttgttactaataaaatcgcaataccgtgctctaaattagcctcttttttacctgtgcttggaagttgtacatgatgcttatttgtataacatccagttaattctgatgttgcttctgagtcatttattgtcactacgtgtatagaatcatgatgagtatttgaatccgtaccatgctttagaggtaatgtatacgctcttgatcctttattcgtatgacatgctttagatgatgtaagttcttgattagattgatattgataaggtccaatcaaatgtgcaatgttatgatattgtgattcttgagttaacttattttctaaagatagcattgttttgatagggtgatgagcaacatcatagtgattgatgtgtgcatgcgtaccagtataatttttgtgtttatcaattgctatagcatgagtatgacattgttgagtatgcgttgaagtaagatgtttatggtttgtatttgccatatcatttgaatgatgttttggtgctattgatttatgatggttgatacaaggatgaggactttcatgaatggcaactactttgtgatcattatcttttttattaggttgagagactttacctggatgttttggttgtgctccttctaggtgtgtatttgattgagatgatgtcgtttgatcatgcggttgtgtagtagtcgcatcatcagtttgttcatcgatttcaggttgaccattgatgattcgtacagcatccactgtatcataactacttagatcagcttcttttatatattgggaaacaacagcatctaaagagattccttcctcacgttttccaccgaacatatcataaccatcaccttgatgagctgtaaaatcatttgtcgttacataatatgtacgattagaatctaaattttcatacttaccagttgatttgtttaagattttaatggcactgacacgttggccagattctttatcaagattaaagtatacgcgaattgaatttgatacttgtaaaaagccaccacttggggctaaaacttttttcccatcttgaatatcggtagtagaacttaaactatgttcaaatgcttgtttaacgtcagaacctttaacttcaatttgagaaattaaatttccaaaaggtaatactgttataacatcattttctgttacttggcctgtttgaatagaagctctaataccaccaccatttgtgactgcaaagtcaggtcgatgtgagaaattattttcagcataagcctccatagcatctgtaataagattccctaaattagtttcttgtgtacgtacgtgttcacgttcgccatttaacgtcactggattatttggaataatcacagttgaggtttcttttaaaaattcgttatttgcttgacgtgtttgagcttcaatttgagagtcagttggaacttctttagtatctgccacattaatcagtgaggcatttacattattaatagttccattatgtacatcgaaatcaatacgtccaacatttgcaagtgctgtacctgtttgagtaagtacattatttgcgccgtagtctctaccatgttcgattacggtatgtgaatgtccatctacgacgaaaatggggtgtgaaaatagttttgattgtgttaattgatcaattaaataattactacgccatatatttcttgtagatttatcgacacctaagtgagataaaataacaaaaacgtctacattatctttaatatcattcattgcttgtgtcacactgggaagtggatctttaaattcaatatcattaactgctgttggagaggtttttgttttagtttcaggtgttgtcacacctacaaccccataacgtatattatttttagttatgattgtagatggtttaaatataaggtggccatctttataaatattagatgataacattgggaaattaagctgttgttgcaatttcattaactgatcataaccaaaatcaaattcatggttaccgattgtcatagcatcgtaacctacactattcatcgcttttgccatttcttcaccttttgatttatttgaaacaggcagtccttggaaagcgtctcccgcatctaatactaaatcaggttgaatttgatctttaagaccttttactttagccatgccaatcactcttccgtcttcttctacaaagcgaccatgaatatcatttgtatgtaaaatagcgtgtgttgtagatgatggtgtagttgctttagtatttgaagtagtttgagttgtaatgttcttatgatttaatgttgtcgtatcttgagattttgatgtttgtgttagtgtagccttttgggttgatacattagttgatgggcgagatgtttgaacagaagaggttgatgatgtcttttgagacattgcttttggtgcagtaatattttcttttgaagtttgaagtttgaagttgtgccgatgatgtttgagttgtttgtgatgctttttcttgagtaggtacttcagatgacgtttgagatgttacagttgtcgatgatgttgagttcgtctgtggtgaagaaatatgttgctcaactatttgagtcttattttgtgttgatacattatcttgagaggttttaatagttgagacattttccgtagtcgctttttcagaagttgttttttctgaaaaagtagtttgatgattttgagatgttttctcttgtggtgaagatgtcattgctttagattgggaagatatcgcatcattttgtaaagttgaagcggtatcgggaacttctgctgcatatgatgttaaagataataatccaaaagcaataaagaaaatcaataagagtgatacaaaatatttcttcatgttagcctccttttaaaaataatttacaagtttatagtagcatataggcgctgaaatataagaaggaaaaaaataatttaagataattttaaaaataattaacaaacaaaacgtaaattaaatcaaataagtaatttattagaagaataaaattattactttaacgtacaatctaatgatatatgtaaatagttttataatatagtggatctaagaatatggggagttctaaaaagtcgctactaggatagataagataaagggagaaataataatgaagagaattgtaattacaggagcactaggacaaataggaactgaattggtactaaaatgtagacaattatatgggaaaaataatgtattagccactgatattaaagagctagaaccacattcattgattaatgatggtccatttgaattacttgatgtaacagatcgtgacgcaatgatggctgtagtagaagactttagagcagatacacttatgcatatggctgcgttactttctgcaacagctgaaaaaaatcctttgcaggcttgggatttaaatatgggtgggttaatgaatgctttagaaactgcaagaatgtatgacttacatttctttatgccaagttcaattggggcatttggtgcgtctacacctaagaaaaacacacctcaaaatacgattcaacaaccgaccacaatgtacgggataaataaagttacaggtgaattattatgccaatattactttaaaaagtttggtgtcgacacacgtagtgtaagatttccagggctcatttcacataccaaagagccaggcggaggtactacagattacgcagtagaaatatatttcgaagcggttagacatggtcattacacgagttatatcgctaaacatacgtatatggatatgatgtatatggacgatgccattgatgcgattattcaacttatggaagcggatagtaagacacttgtaatacgcaatggttataatttaagcgcaatgagttttgaacctgagatgattaagaaagaaattcaaaaacatattcctgaatttacattagattataatgtcgatccagtaagacaagcgattgcagatacgtggccagataatattgataccagttattctcgaaaagaatggggctttaatccaaagtatcatttggctaaaatgacagaaacaatgatacgaacgattaaagaaaatgaagaaaagacataagttcataattaaaaaggtggtttggaatttgactctcttttaaagagtataaaaaagaaaagggtttcattttttattttatttgaatttttagaaaatttattgaatagactatatgagattgctataatttatattaaatcttattcatgaaatatattaggaggcttcaacatgtcagaaaaagttaaatttgaacaacgtgacacacttaaagaaaaaccagaaggaaatcttgggtttgggcaatatttcactgactatatgttaagtgtagattatgatgaagaaaaaggcggttggcaagaattaaaaattgttccttatgcaccgtttgaaatttctccagcagcacaaagtttacactatggtcaagctgtatttgaaggtttaaaagcatataaacataatggtgaggtcgtattattccgtccagatcaaaacttcaaacgtatcaatgattcattagcgcgtttagagatgcctaaagtagatgaagaattattattagaaggtttgaaacaacttgttgatatcgaacgtgattgggtgccagaaggcgagggtcaatctttatatattcgtccattcgtattcgctacagaaggcatcttaggtgttcgtgcttctaaaaaatacaaattattaattatcttatctccatcaggcgcttactacggcggtgatacattaaaatcaacaaaaatttatgttgaagatgaatatgtacgtgcagttcgtgggggggtaggatttgctaaagtagcaggtaactatgctgcaagtttattagcacaaaccaatgcgaataacttaggatatgatcaagtattatggttggatggcgttgaacaaaaatatgttgaagaagtaggtagtatgaacattttcttcgttgaaaatggcaaattagtaacacctgcattaaatggtagtattttacctggtattacacgtaaatcaattatcgaattagcaaaagaattaggctatgaagtcgaagaacgtaaagtatctattgatgaattatttgaagcttacgataaaggtgaattaacagaagtatttggttctggtacggcagcagtcatctctccagtaggtacgttaaaatatgaagatagagaaattgtgattaataataacgaacctggagaaatcactaaaaaattatatgacacatacactggtatccaaagtggtaaattagaagataaacatggctggagagttattgtgccagaatataaataacttgtgaaaacaagctagaaacgttataactacgcggtttctagcttgttgttttttattttagaacaacttttgggggtatatcaaaaagtgagttggcttcttttttgcataaaaaaaccactcttaacatagcttatgtcgaactaagtaagagtggtgatgtaaaataaataaagagcaaaatattataacgaaatattctgataattaaattataccctttacaaataaagataaacatttttttatcattttaataattaattagatttaaatgtaaaaaatattatttttttatttcaatagtatagataattaaattttattatgtaataataagtaatgagattacctaaatgacaacccttgacttagtgtttttcttctattacaaataccatatacctaataccattattacttaggtaatctcaacatttgaaattcatttaaatgatatagatctttaggggcataaagcccctttttttatgcgaaaaaaagcctcactcgtacacgactagtaagactaagtttcaatgaaagtaatgctaactatgatgttgctctatttgattaccttaatccaatttttatccgtgatttggatcatcttagagtaattaatacgatatatatttgattcaagtatcatcaagagaccaataataaaataaagtaaattgaaaaagtggaaagacaactttaaatgatgtctttccactttgttgagaatagaaaatataaggaattagatatttaaataatgtgaagaaataaaattaatgagataccccattaatgctaatataccaagtgatacaaatagtgcagaaaaccctctgctaattgttttataagcgagtccttcattttgtgctaagaagaaacttaatataaataatccaattccgattccgaataaaataaaaataacgattaacatgaatatatcctttcatttttagtaatgatatgatgaatatcattgttaaaattactcaatagcatatcacaaagatatgttatggaatttgatgaatcagttcattcattttttaagtgaagattgtaatcactgtattatctattaattaaaccacttatagatataaaagcaataaggcaaactttttattatttttcaatacatctttttcatttttttgggaacttgatgaataatttggacttctaggcaacatttaatatgaaataatagggaaatcaagacactttagcatgagtcatatcaacttaggcagaaatctcctataaattaaaatatgtactaaactattagttgtaaatatatttaaggagatgaaaaccatgttagatatctttagtttcattaaaaaagtatatgatttagtaagtggtattcttgtaaatggtgaaccgagaaattaattaattgtttccccctaatcgaattgaatatatattttcattaaatactagtaaagcacgctttttatttagatatagttactaaataagaagcgtgtttcttaatatataatttaaattatagcgaattaacatttaggtattaaaagtaaacaattaaggaactgtgtacaatttttttgatcgtttatgataaagttgaaacacattaaataagaggtgatgataatgactgaagctaaatattcaaacaatgaaattgaaaaattttctgattttcataagaaaaaacatcgtgatacatgttgtatagcacctaaaattaaatatcatgaagataaatttgtattttctccagtttctgacgatactgaaacatcaaatattaaaacatttattacagaatgcaaaaactgtggaaaagtagaattttttaatatcgcacctgtaagattataaatatataatgaaatagaatgttgatacttgtcaacttgttgtagataataaaaatgaagtgatgtatgatatttttagggactattcccttacacatagtctcattcccgttgaggcattaatgccaacgttattcaaaactagttttatatattcttagttgagtcatacctagagaggtatggctttttttataaacctatgctaagcaattcttttactatacttaaaagaacaatgtatattacaatgaaatacaaaataaggagtgtatatataaatggaatggatattatttgataaagatggtacattaatcgaatttgatcatagttgggaaaaaattggcgtacgcttggtaaatagtttcctagagacatttcctgtagcgaataaagaagcaacgcttcgcaaactaggcgttgttaaagatacgattagtccagattctgttatgggttcaggatcgttagatgaaattgttcatgcatttaatgatgaatctggaaaagatgtttctaaatggacgcgtgatacaagtcaaacattagtagatagccgtgaaccagaaaataactggatagatggcgtttatgatatgattcaatcattacgacaagaaggctataaaattggtattgtgactagcgactctgaaaaaggagtgacacaatttttagaagaaacacattctaaagatgcgtttgatttagtcatttctactgaagcgcatgcggctgaaaaacccaatcctgaagtacttaagccactttttgatcattacgatgttaaaccggaagatgtagccattgtaggtgacacaaataatgatatgaagactaaagtgaatgcaaagttaggtttagccattggtgtattaagtggtatcgcaaaaaaagaggaacttgtggatgctgattacgtgattgaaacagctgtgagtgtaccagaagtattaaaaaaatatacacaaaataattaaacacaaagagattaaagtatcaattgttattttctacatttataacatattggcagccaaggactgaattaaaaatgtatttataccaattttttaattctagtccttcttgcctaggtgagacagtaaattctgtctctctttttttatcgatgatcgacatttcgatatgtttgaataatatgtgcaattttgtcgataattggatctaaagagtcggggttttcatgaatatcatattcattaatgttcactcttactacgggacaagcattaaaattgttaatccaattttcatagcgtttaaataactttttccaatataccggatcagtattcatttccatatcgcggccacgttgatgaatacggtcgattacttcatcataatcacaatctaaataaattaaaacgtctggtttagggaaatagggtgtcataaccattgcttcaaataactccgagtaagttttaaaatcttctttactcattgttccttgttcttcatgcatttttgcgaaaatatcaacatcttcataaatagaacgatcttgtataaagcctcctccgtattcaaacatgcgtttttgttctttaaaacgttcagctaaaaaataaatttgcagatggaaactccaacgttcaaaatcattatagaatttatctaagtaggggttatggtctacattttcaaaggaagttctgaaattgagtttatcagcaagcgcttgagttaatgtagattttcctacgcctaccgttccagcaattgtaataactgcattttgagggataccgtaattattcatattttatatctcctatcatgggtttaatttggtttaaaatcaattgataatctgattcattttgtacaaaatctaaatcagaagtgtcgattaaaatcacattagcaccttcgttttttaatgtttcataaaatgataaataatccttttttaaattaagtaagtagctatcttcaatttgatgttcaaagctacggttacgtttagcaatgcgacgtttcagtacatctaaatcagcatctaaaaagatgatcatattaggtaattcgagatcttcagttaaaatattgaaaatacgattgaatttatcaaattctgattcgttaagtgtattgcgcgcaaatattctatttttataaatatggtaatcacttaccacaccttgattaatttttgcaatatcttgtgcttgtttataacgattacaaaggaagaacatttcagtttgaaaactccattttgaaatatcatcataaaaatcagaaagaaaggggttttcattaatgatttcattttcttcataataattaaaggtttggctaattttatgagtaagagacgatttgccaacgccaatcggaccttctattgcaataaatggtttattcataattacatctccaaatgttaaaatagacattgagtattttatcataagtaagggatgacacatatgacaaatgatgaattttacatgaaatgtgcaattgaagaagcgaaaaaagctcgacaacttggtgaagttcctatcggagcagtgatcgttaaagataatgaaattatttcacgagcccataatttaagagaaaccctgcaacaacctactgctcatgctgaacacttagcaatagaacgggcagctaaagtcataggaagttggcgtttagaagattgtacattatatgtcacattagaaccctgtgtcatgtgtgctggaacggttgtaatgagtcgtataccacgggttgtatatggcgcgatggatcctaaaggaggatgcagtggtagtttaatggatttactacaacaaccacaatttaatcatcgtgcaattgttgaacagggtgtgttagaagaagcgtgtagcaatttattgagacaatttttccgtgatttaagagctaaaaaagttaaaagaaacacatcaccgtacaaaagatggtaaatttgttaaaataggaacggcaaaacaaatttaaattttgtaattgtgttcactgaatatgtatgttctaaaatataatagctgtaagtttagctaatgaaatgaggtaacggcatgattaaactgattgcaacagatatggatgggacactgttaaatgcagcacatgaaatttcagaagaaaatattaatgcgattaaatatgctcaatcaaaagggattacagtagtcattgcaacgggtcgtgcgttttatgaagcaagcacgcccatggctgaaacagatttaaaagtgccttatatttgtttaaatggtgcagaagtacgtgatgaatcattcaatattatgaatacctctcatttaaatcatgaattagtagaacgaattaaagcgattcttgatcgggaagacgtgtactaccaagtgtatacgaatagagggatttatacagaagatccaacacgtgatttagatatctatttagatattgcaagaaatgcaggccaacaaggtgatgttgaaaagattaaagcagggattcaaaaacgtatagataacgggacactcaaaattgtcgataattacaaggatattgaagatattccgggcgaactgataatgaaagtactggcgtttaatccagatcttgaaaaaattgaacgtattggaaaagaattatcggccatatcaagtcttgctgtttcatcatcatcacgtggtaatttagaaattacgcattcagatgctcaaaaaggaattgcattagaaactattgctaatcaacttcatattgacttacaagatgtcatggcgttaggtgataatttaaacgatgtatccatgcttgaacgcgtaggctatcctgttgcgatggacaatgcgatgcccgaagtgaaagctatagctaaattggttacagataccaatgaacatagtggtgtaggtaaagcaattatgaaagttttaactgaagagaaataaataatatttaagaggtgttagaacgaaatgaaaggacttatcgtagtaggaagtgcacaagtaggttcacataccaatgcactagctaaatatttaacaggacaattcgataatcatgatgtcgacgtagatatttttgatttagctgaaagaccattaaatcaacttgatttttcaggaacaacacattcaacagaggaaattaaagccaatacaaaagcgttccaagacaaagcaatggaagcggatttcctaatttttggtacgccaaattatcatggttcatattcaggcattttaaaaaatgcgttagatcacattaatatggaatatgtcaaaatgaaaccagtgggcttaattggtaacagtggcggtatcgtaagttcagaaccactctcacatttacgtgtcattgttcgtagtttattaggtattgctgtacctacacaaattgcaacacacgattcggactatgcaaaattagaagacggtacactgtatttaaatgacgaagaattccaattacgcgcaaaattatttgttgatcaaatcgtatcatttgtccataacagtccgtacgaacatttaaaataaattataataatgttaaaaaacacatttataaaggaagaaacgagtttaaagagcgataagtatcgctctttttttatttttttattaaattaaataaaaaaagtattaatatttttttaataattattagtatcaatgaagacgtgtgttttctaaaattcctgatattttttgaaaatatatgtattgtcaatataatattaaaatgttatatttttatcggagtattgtactcaattaatttgaaaaataggggtgtgagttatttgaaaaagaaaccaaatcgaagattagatttcttacctaatgttcaaaacaaatactcaattagaaaatttacagtaggagcggcatctattttagtaggtgcaacattaatctttggggcagggcaggaagaagcaaaagctgccgaatcagatcaaacagtaacaaatcaaaataatacatcttcacctactgatacaacggaacaaccatcaacagaagaaaaagtgacaagtgagaacataacaacagaccaaccatcaccagaagaaaaagcgacaagtgagaacataacaacagaccaaccatcaccagaagaaaaagcaacaagtgaaaacataacaacagatgaatcatcagcagaagaaaaagcggctgaaagtactcaaacagatgaatcatcagcagaagaaaaagcggctgaaagtactcaaacagatgaatcattagcagaagaaaaagcggctgaaagtactcaaacagatgaatcatcagcagaagaaaaagcggctgaaagtactcaaacagatgaatcatcaccagaagaaaaagaagcaaatgacagtacagaaacaaaccaatcatcattagacaaatatgaaataactagtgatgttgttgaacaacctgaagctagtgcttcaattcaaaccatctctgaagagttaaatgtatcaagtaatgatacagttcaagctctagaaaatgctggagtagatacatctaatgcaacagaagtagaagctattgctgcacttattcaaaatgattatgccaataatagcaacgaaacaccagttgttacaccattaaacataaattcagcaactgcacgtaatgaagaaacaacaaatacactaagaccaagattatttgctgctagggcacttgctgctgatacgccaaccaatgataatgtatctaatactgataacaatcgaattatcgaagcagacgcgattaagaatggttatattaaatcacaaacagatgctactaatgcagctaatactttatcaggacgtgcttgggtagttgatcaaggtacacctgcaactatatcaaatggtttaactcctgttcccgacggtacagctgtttacatgcaatggattgatactgatggtgtagtatctccaatctatagagcgcatactaacaattctttatcaacgtcaaatggttcacaagtaggacctggtgcttatgcgtttgacttaagacaagcctatactgatgcaaacggtaaagaacataaatattcagcgactagcggtcaatattataaattatggattgaggattatcaaactaagaatggtaatactgtaacgatgttacgtcaagcaggtggattcttccctggttcttatgtaaattcagtaacaagtaataatattggtcaatttccattaatcggtacaaacatgcaacgtactggtatttacatgggcgttaaaccttcatctgattacatgactacaagtaaagatcaatggattcatgatactcaaggaccgattagtaacgcagctgtaaatacaaaagccaaaaatacagtttctggacaagtttggttagaaactggtactggtgttgatttagcaaactctgcaactggtccaaacttatctgggaatgataaagttgctccaggctatacagtagttatgtcatcacttactagcgaaggtgttcaagcatataaagctgctgtagatagtttacctgaatctgaaagagctgatgcagctaaagttctattaagtgaccatcctgaatatatttctgcaacagtatatggtgaaactgactcaaatggtagatatacgttgcgttttccagatggaactctaaatgatgaatatatgtatggttatgtggttaatccaaatggagaagttcaaaacgcatactcttcattcacatcaccacaatttagatctccaatggctaactcatcatttgttcctcaatctagaccaggacaaaacttgatagttaaccctatgtggtacaatttaaactttgcattagtacctcaaaacgatgttaaaattgacataactaattacaacaatactactaaaccggctagaccaggtgatgtagctcaaattgatttaagtggtactcaattatcaccacttcctactcatatcgagtggagagataaaaacggaaatgttgtttctaaaacagatgatattacttcatttactgatggagagcaaaagggtcaatttactgttccagcctcagcgcaaagtggcgatgtatacactgtatttttagttacaggtggtaaagacgttggatcagattcatttgtagttgctacagataaagctgcttatgaaccaacaacagacggcgttacaaaagattacggtgacccaacaactgaggatgatgtaacaggagcagtaacaattccagattatccatcagaaaaaggaacaccaacaatcacagtagatgatccaagtacattaccaaacggtaatacgccaggaacagacgacgttccagtaacagtgacatatccagatggcacagaagatcatgtaacagtaccagtaacaacaaatgaacaagcagataacgatgcttatgaaccaacaacagacgacgttacaaaagattacggtactccaacaactgaagaagatgtaactggagcagtaacgattccagattatccatcagaaaaaggaacaccaacaatcacagtcgatgatccaagtacattaccagacggtaatacaccaggaacagtcgatgtacctgtgacagtgacatatccagatggcacagaagatcatgtgacagtaccagtgacaacaaatgaacaagcagataatgatgcttaccaaccaacaacggatgaagttacaaaagattacggtactccaacaactgaagaagatgtaactggagcagtaacaattccagattatccatcagaaaaaggtacaccaacaatcacagtcgatgatccaagtacattaccagacggtaatacaccaggaacagtcgatgtacctgtgacagtgacatatccagatggcacagaagatcatgtnnnnnnnnnnnnnnnnnnnnnnnnnnnnnnnnnnnnnnnnnnnnnnnnnnnnnnnnnnnnnnnnnnnnnnnnnnnnnnnnnnnnnnnnnnnnnnnnnnnnggaggactctgattatgcctcgtaaaggatcagtaccaaaaagagacgttttaccagatcaaattcacaactctaagtcagtgacaaaattgattaacaaaatcatgctagatggtaagcgcggaacagctcaaagaattctttattcagcattcgaccttgtacaagaacgcagtggtcgcgacgcaatggaagtattcgatgaagcaatcaacaacatcatgccagtattagaagttaaagctcgccgtgtaggtggctctaactaccaagtacctgttgaagtacgtccagaacgtcgtactactttaggtttacgttggttagtgaactattcacgtcttcgtggtgaaaaaactatggaagaacgtttagctaacgaaatcttagatgcagctaacaacacaggcggcgcagttaagaaacgtgaagatgtacacaaaatggctgaagcgaacaaagcattcgctcactaccgctggtaagattcaaggtttaaccctgagtatgttcgcatggtactaccaggacttacagtctctatgagaggagacgatagtctgagttcgcctatgtgctattattcattgtgctcgtgctggtcaacacattacgttgtcgctgtttttttttttttcaagcagaagacggcatacgagatcctctctggtctcgtgggctcggagatgtgtataagagacaggttaaagccaccataccgtaagtgtttagttcttgaaatgttttaaggtcggcttgcatacctgcgccagcgcttgtatcagaaccggcaattgttaatactttttttaatgccatgtattatcactcctgtcaattatttacatctttatttatcatatcatgtaactcaactattgttctagcatgaaaatagtaaggcgatttatatcacgtttcagaggggtcctatgttaaaatagctgtctcttatacacatctccgagcccacgagaccagagaggatctcgtatgccgtcttctgcttgaaaaaaaaaaaaaataacaaagaatgaaaaaacaataattaacaattaaaatgcatgtcgactaattaaacagcagaaactaccccaacctatcacacgaaagatcaaagaaatactaaaatgtagtagtgtctactgacaggtagctatataaggagagacgtgggggagaggatgatggaatagtagtaatgtttttttttttttcaagcagaagacggcatacgagatcctctctggtctcgtgggctcggagatgtgtataagagacagcccttgaagttttaagacgttattgttttgataaagctttcataggtatgaatggcttagatttgaatcatggattaaccacaccagatgaaaaagaagcattaattaaagaaagagcaatacatcaagcaaccacatcttatgttttattagaccattcaaaattagatgaaacatatttgcgcatgtctcaaccaaagcatgccatgttgagtacctgtctcttatacacatctgacgctgctgacgatactacttgtgtaaatctcggtcttcgccgtctctttcttatatcaactcataccactcctcctcttctgccactcaagcacacctctgcgtgcccccactccctctagcacatgcgcgatactcactcgcnnnnnnnnnnnnnnnnnnnnnnnnnnnnnnnnnnnnnnnnnnnnnnnnnnnnnnnnnnnnnnnnnnnnnnnnnnnnnnnnnnnnnnnnnnnnnnnnnnnnaaataggactaaaacagaaatgttttagtcccacctacttgcttaactacagttcattttcagatttactcaattgccattgaagataaagttcgactgcagttaaaagaacattaatcattgccaaagtaactttaatctttttcttagtactcataagtcttcctcctttctttaatagcagcatgctatattgtgatattgtgttgatcttattttgttatcccctcccttacctttcgtttgatctaggtggttgccttagcaaccacttgttaataaaaaaagagaacatctatttaaagatgctctctaattgaatcattattgattaaataaagaagtgatggataaatgatcgcgtcgcttattaagtgtatgcatttcagcgaattcagacttaagagatttcataagatatccttgcatggcttcaacagtttcatttttttgaataagcatggctttaaactgtttaagaacatgaagtatttcgatttccatatcttctaataagtaatatgtatcaatagaattattaaaagacgttttggcttttaataatacaggtttgatgattttaatttcatttacagaaaagttatttaaatacctttgaatactttgaggtagttcttcgagtaattgaaactttaaagcttcatcattaaattttgaattatagtgatttgtatgattactaggatatgttaatttcttatcattcaaatcatacgtatcattataatcagtatcattagtgtatttttttgatacatcatgatgtatcattctaatatttcctgatgtatcattatcatatttctggatgtatgaatttgatacatccgtagaatattgctattctacgtcattttcttgttgtgaaatacaataaacatcagcttttgttacttctggtttttttagatacaatttatttggtttatttaatcccactctgacttgactaaacaaatcggctcgagttaattctttctttattttagataatttatttgggctactaatatttaggattttttttaacttttcgttagtatatataaagaatatatccccattttcatctatccaattattttttatagacaaatctaaacgatctcttaatattgaccaagttatttttgcatcattagataatttagtatatttaggatttgtaaagaatactttaggtaatcgatagaatttttctttttggatttctttaatattaaaattagacatacaaaaacctctttcgtatttaaatttttaaaagaggtaataaaaaagtgataagtaagtatatatgtattagacttgcactaataaatcttaatatatataatatgaatacaacaattatacaaaaacatcttttttattaccgtagaagcctaactattcccgtagttgggcttctttctatttataataacatttttcaaatcattcttacattatatatacattaaatatatatataatgtatatataatgtaagaatgataaaagactatataatatctttatatggtattataggattttatataaagaaagctataataatacgtataacaggtatataacaagtatataaagataataaaaagaatgtgtataattatatgtatagcttttattttcaagaataaaaccttaaatatagtaagtataataactatataacgtataataaatactatatatagttatacggaggctattatatgaaaagtatgaaaaaaattgctgacgaacttaatgtgacaaagatgacagtttataacaatgctaaaaaggcaaatgtgaaatttcaaaaaatcgataacgtaaattacttatctagtgaagatgaaattatagtagtaaatagaattaaaaaaaataaaaaaaagattattgatactgaaagtaaaacagatgaaaaaaattatgataataatgattcagtcaaagatgaaacaataaagcaattatatattcagctagatatatataagaaacaggcaaatagagataaagaacaaataaatacacttaatagacttctagaaaaccaacaagttttagcattagaaagtaataaaaagattcaaaaactagaaagtcaattagaagaagaaagacagcttaattattcttttgatacagcagcgaatactagacaaaatattaattcgcaagaagcaacttttactgaagaatctcaaaatattaaccaacaacaaaggaaaagccaaccaatagaaaaagaaataaatcataaggatgtatccgaagagaaaaagaatgacaatacaaacgaaggtgaatttacaaaagaggataagttcgttgaagaaacgaagagtgatcctaatgataataggaaggtagaaccacctaaaaagggattttggagtcgattcttcggtaattaaaaatgaatgtaaaaggtgtatcaagggtttgtaaatctttgatacaccttttatagtgacggaatttctgataatcagcaattatattaactaaacaaaaaggtaaaagtactgatataacagtatttgtatctttttgtctagattataagttttcatttattctcattgacgtacattttgtatctttatttagtcttacatgtataaaaaacgagcaatttaattcgtctattttttttagacttttatgataattttgtatacctgtacatactttcaaagttaattttacagtataaatttaacaaaaaagagcattcttcatgaattattttttaaatttttttaaaaaatataaatgaacattgtatattactactgcgcttattaacataattattgtataaagtatcgtacctaaaatatcatggtgtttgataaaacttattttttgtaacaatgcggctactataaagatcattataatgttaattacataaaaggtagtattaatggttacttttttatttttcttcattaaaaaaactcctatttctcaaataagtgatcagaataataaagtaaaatcgttagttgttatttgattaatcttatctgtattagctatattaaaacgaatattctcattttgtatctttattctgttaataaaataaacaacaaatgtcctaaaataactaagataatagttattaaaataatactgattgttgctattatttttattgttcttctactaaagtcagtattagtataaaccgaaaaatagaacattaccaagtatccaacgaacatgccatacatagataataaaaaattccattcaatatccatatatcctccacgcattaaagcataaattcctataattataaaaaataaaataagttggtatataaaagttatcatttatctattagcctcttacattggtattatattcttggattggtagcaatctttgggtaatgttctgaactaatagaggagattggaaacttaaagaacaattaaaaaagttataatatggtaatactagaggtgtgatgacatgagtataaataaaaaaatatatcttctttgtttcatattgtcttttgttatttatatttttctgcctgttattattggtcaaaatctttttattactcgtctattcgttatttttcctttattattcttaggtgcatttttattttcttcgaacaaaaaaagttagcaacaagggtagttgatttttttactatccctcaattttaatagaaagataaaaaatggataataattagttttatagtgacggaacttctgataatcataatttatgttaaattatatgtactataagatttagggataatataaaaaaaggagagcaaaggcttttattatcagcattcgtcccccttttttgtaactaacataatttttggtaaataattgtataattaatattattcaattattttctttttccaaatgcgcctctcataaatcctttatatgcttcaataatacctcttcctacattcatcattacactccccttttttatatgaaaatcaccatttcatatataatccaaatgtagaataacattataattaaaaaaaaatcaattttatattataatgataaatttaacttaattgtgttttacattaaatcgacaaaagatatattatatttattagataatgcttctgctttaaaaatgatctgttttaattcttctttttttattgttactatcttatctttagcataatcatttataatatatccaattttaggggttgcttttataatttctagtttctctaaaagctgataagctgattgtatagtaataatacttacatcaaatatttcggctgactttctgattgaaggaagctttttagttttataattttcttcatagatgttttgtattaaaatttctgatatatttaaatacatagatttattttcacaattaattaaacatttcataataatcctactttcatttttaatttttaacatatcattttttatactaatttataataaggagagtacaatggaaataaaagatgttactaagaaatacaaagataacaaagtattagataatttaagtttctcatttgattctagtcatatagttggattaattggtaaaaatggtgttggaaaaaccactattatgaaaataatgaatggtaatattgtaaattttgatggaaaagttatttctaataaaaaacaaaatattggatatttaattgaacaccctaaactatatcaagacttatcaggaatgaaaaacttaaaaagttttagtaatatattaggggtacaatttgataaagactatgctaataaaattataaaagcctttgatatggcaggttatattaacaaaaaggttaaaaaatattctttaggaatgaaacaaaagctagcaattgccgtctcgttaataaataagcctcagtatttaatacttgatgaacctactaatggaatggatccagatggttcaatagatgtattaaatactattaaaaatataactaatgaatttaacatgagagttttaatatctagtcataaattagaagatatagaattaatatgtgatagagctgtatttttacgggatggaaagtttgttaaagatgttgatatgacaaatacatcttcacaagaatatacatccatactatttaatgaaaatgatttggaaaaagctaaacatcatttaagtttaaagtcatatggttcaataaatcaaaatggaaatactttgataattccaaagcttaatacttaccaaaatatattaaaagatttagctaatattaatatattcccaattaaaattgaagataaaataagtactcttagagatacttattttaatattaataaaggagaataaacaatgagtatatatcatttaacaaaatttaatatatcaagattggtaaaaaatcctttcaattatattggtttactttttgttttaataatacctgtattttatacattgactcaggttcataataatcataaagtctctggagaaactattttaactctttcaacatggctattcgcattctggggagttatgattattactagctttttagtcagagacttttctcaaggtacatcacaattgtatttgaacagtttaaaaaacagagtgaagtattttatatctcaactaatctcaattttaatttctagtgttatagtatttttaatattatatgcatttgttttgataatgcaaagtgtaggtaatggtaaaactatagaaaatgaattagttggaaaagcgttaggaatatatatcttattatttctattttatggtttgtttctatttcttattactttattagtgagaagctcttctttggttttctctattggagtttttcttatattaataatacctatagcaacgaatttagttccattaattccagaatatggcgacgaagttagaaaagctttgaagtatataccgtttaattttttaatcaataatgtttggcttggatctcttaaaataaatggatggcaaacatttatttcaatagcttctatagtaatattagctataattgatttcttcactatttctaaaagagattattaaaaatttaacaaagtagttaaatcaaaaaaggattttgaagattcctttacgtgattaaattacggttataaaatcagaaaataataaaatatcttctctttgaaaaatgttaaaggtatgtttaaccaaataaattttcagcaattatttaccttatttaaactttcttgaaaggaattttaaagttcatattagaatatatagtactatattgtgggaaagattggcgaaaataaatgaggttgggacataattcttagcaaaatagccagtaaatgagttttttataaattcatttactggcttctttatttactgtataaagaaaaccatgcgctatgcgtatggttcagaaaaggttttaccgttatctaaaaaaacatctcatcatgctagaatatatattggtcagccaaccaaaatattcaacacgagaagatgctttttaatgtcatctaacataaacagtttagcacatacaaaatggaattgtaagtgtcacatagtctttgtaccaaaatatagaagacaagtgatatatggaaaaatcaaaagagatattggagttattttacgtcaactatgtgaaagacaaggcgtagaaataatagaagcagaagcatgtaaagatcatattcatatgttagttagtattctacctaaattaggagtatcctcatttgttggatatttaaaaggtaaaagcagtttaatgatttttgatagacatgctaatttaaaatatagatatggaaatagaaagttttggtgtaaagaattttatgtagatacagtaggtagaaataaaaagataattgaaaattacattcgtaattaattacaagaggatatcgttgctgatcaaatttcaatgaaagaatacctagatccctttacaggagaagaaattaaaaaaagacgaaaaaaattagtatccctttaggggtgctagaaaagtagtacagttggctgccctatcagtgcccttttagggctggccagtaagaaaggcttatagacgtagaacaaaccacccgttcacacgggtggttttgatttttatcctggaattttatgtcccggacttatttattttccaaatgcaccttttataaaagctttagttgctttgtaaatacctctttgtatattcatcattacaccacctttttatatgaaaactaacatttcatacatttaatataaatgtatactaacattattatttaaaaaaatcaattttatattatatgtaaattgtttctgaaagagattagtaatctaatttttttcaagaatgcatctcttcaaaaataatagttttttaagatgagataattatatattataaaactatcatggatattataaaagtaaataaaacagaaagaatgaatgataatagaaaaattgtaatgattttttctttatacgatacattttttaacgctactaatacacataagctaaagagtatgaagcttaatgcgaaataaataccaaattgaataaaaataaaattaaacggattacttattgttttaattgactcttccatattatgacctttctacatttaaatgatttatatgtattcgattttagaaaattaatattatagtaaaataacaagtacagaaattttgatgtaatttttattataaaggtgtttctattttaaataaaatattttattataataacattgaaaaaactatatattaatattatgatgttgctgaagatgtattttgagtaagattcattatgcatggtcttaaagagtttgttaatggtactactggaaaaactcttctaaatttttgatactatcataaaattttcttaggaagtgtataaaatatctattacgatacttcctaattctttataacattcaaggagatatattaatttgaaaaatgggaatccactatttaatattttgaaaaaaatcagtataccaaaaaaaataattttatatgctctaataatatctgcacttggtagtattataggtttgttagttccttggtttactggagaatttgtagataaattgaatgaaaacttatataactataaatttttgcttataatattttttgtttttctattaaacgctgttgtaagtggcttaggtttgtatttattaagtaaatttggggaaaaaataattttttcaattagacaattagtttggaatcatattgtttatattaatgtctctttttttgataaaaacgaaagtggacaattaataagcagaattatagatgataccaaagttattaataattttatatctcaaaaatttcccaacgcttttccggattttttaactattattggctcactcataatgctatttgtactagattggaagatgacaataagcacttttattattattcctatgtttttgttatttttaattccgttaggtcaaattactgaaaaaatttctaataaaaagcaaaatgagatagcactttttagtggaatgattggtagaatattatcagaaataagattagttaaaatttctaacactgagaataaagaatctttaaaaggaaaataccatttaagaaaaatatatgatttaggcatcaaacaagctaaaatttcagccgttatcgaaccgatatctagtattttaattttattgatgattgctttagttcttggttttggtagttggagagtttcgaacggatatataacttcaggaaatttagtagctatgattttttacgtttttcaactaattgttccagtaaccaatctttccactctactcacagactataagcaagcaaagggtgccagttaccgtatctttaatattattaatgaggatatagagagaatagataatggaaatgatgaaacacctaagtcgttttctttaaaatttgataatgtttctttcgcatatggttataaaaatgtgataaataatttgaatcttgatataccagaaaataaagtgactgcatttgtaggaccttcaggatcagggaaaagtactatattatatttaatatcgagaatgtacgaagtaactgaagggagtatctatgtcggagaaaacccattaaacaatttaaatttatcaaaatggagaaataaaattgggtatgttatgcaagaaaattttatgatgaatggtactataaaagaaaatattttatatggagttccagagaaaacgataaatgaaaaagatttgatttattatgctaaaaaagcaaattgctatgattttattaccaatctagaggatggtttcaatactattgttggtgaaagaggcattaaattatctggaggtcaaaaacaaagaattagtattgcaagaagtcttattaaaaatccgaggttacttcttttagatgaaattacagctaacttggatagtgaaagtgaaaagaaaattcaggatgcaatgacaagtttaatgcaaaatagaacaactataattattgcacatagattatccacaattcaaaaagctgatcagattgtttttttagataatgggaatattacaggaattggaagacataaagatttatataataatcatcaaaaatatagggattttgtaatgaatcaacaggtataattttatatatgtgatattttttacttaaggtaatttggaatgactataggaaaatagtatattggaaatcactatacttaacaaaatatgtaaccctaacaaagggtaattgaaaacttctgtcaaattgaaaaaagataagaacacttttgtaattattatagcaattataaattgtataatgattacaaaagatttttctattttttttctagatttaaatattataaaagatattggtaggataactatgatagttatatatgatagtattcccatttcacctataataccgctatcatcttttaataaagagaaaaaaggaatgttagtggaaattctaattacaaacatatatacgagagtataaatgtaaaaagtatatatgaaaaattagaaaaagtagataaatacaaagtaaaaaaactatataaatatctaaataatactatcctaaattatactagtagattaactgatattagtttaaaagatgttaatgttacatcgaatgatgaaattttagatagtcttatacatttacatcataataggcttatagggataaatagagataatgaaattaaatatttaactttgtttagacataaactatattcgcaaaatgaacgtgctaaatttcttaaagaaaggtagtttatatatgaaaaatgaagaagtttcactaataattgatcaatcacttcataaaattgtatcgaatttctctaatccagatgctctatctgaatatatagctaaaaatagttctactactagtcatcttaacccaactttatctgacggaattcctggatttctatttttattcagtgaattccctacatattttaatgatgaatttattcacagttatatgaaaaaattaaataactttataaataatgggtatattacatcattatctctatggactgggttgagcggagtggccttttctataaaacttcttgtagaatcttctaacggaaattactcaaattttttaaattctttaaataatttaatattagataatatagattcttatatcattgattttagaaaaaaacttgagagaaaagatatcacatctttagactttgatagtatttttggactttcaggaataactagatatttattagaattaaacgaagatcaatattgtcaaattgatgattcaattaaagaaatactaaaattattagttgatttaagctatatggaaattaacaataaaccaatatctaaagaaagatataataaaaatgctacggaatatctcttaaaaaaaacaaagcatggctatctagatacaggtttagcacatggcttatgtggccccttatctatactatccatagctctggaacatggttatgaggtcccctatcaaaaagatgcaattaaatacttaattgcgtctttaaaaaaaatagaaagttttgatgaaaacaaattatataattgggatggtaaaatagaaagatttcaaaaaattaattatagagttcctgctatgtatgggtggtgctatggattacctggtattgcgaggagtatatggattggtgctaaagcaattaattcagatgaatataagctttatgctctgtcattattaaaacaattgacttctatctccatagaaaaattaaaaatcaattctccgcatttttgtcacggatactctggggttttaattatatattatttaatgtatctagatacgaaagagaaagactttaaaaatttttacactaaaattcttcataaaattctagaattttatgagggtgataactatttaagtttctttaactatgactatgaaaataataaaaatttaaatattgggctactagaaggaacaagcggaataatactttcacttaatagtgtagagacactctctaacccacagtggtccaagaccttcttattatcttagtaaaaggttagaggtttttatatggatactataaaaaaatggcaatggaatattgctaaattaacccgagatttcaaaagttacactatagaatctaaatctcatgtagcaactgttgcaataattgatagtggaatagactgttatcatcctgatttaaagaataatatattgaatcttggtaaatcttttatatctcatgacccttctcttttagattttactggtcacggcacattgattgctggtgtaataacatctacaggtttatctaaaggtatttcaaataatattaaaatagctccttacaaagttttagattctaatggtggtgattctaaaaacattattgaggctataaaacaagctgttattgatggtcacaaagtaattaatataagttctggaacttatttatcatcaagtatcgaaagtgataaaagtttaataaaggggtacaaagaagctgttaacttcgcactaagtaaaaatacaataattgtcgcatcatctggtaaccattattcatctgaatataccaaaaacaacatatactactatccagcttgtctaaaaggagttattagtgtaggagcattagacaaagaaaacaaagtaacagaatactcaaagaacaatatctcaacagatttatatgctccaggaggcagctggggacctgattattataaaaatggatgtatagattatagatacttaatattatctacatttcctacgtacttgagtacatacttagctcctaaaaacagtttacctagtgggtatgaatttagtctaggttccagcttggctgcagcacaaatatccgcaactgtatctttgttaattgatcaatattatgccattcaccaagattacccaactcaatcctatgtaaaaaggattttaattgaatcttcaagtaatactttaatagtaaacacctttgattgcttaaagtatttaagaaaattaaacggactgtaaatatgcttagatatcatttattaattacttttcaaagactctatttaaattaactaaatactattgagaatacattactattctcaatagtattattttagtcaatgaacatcattcaagataattctttatctgttttgattctgtacactgtttgtcttgtaatattaaccgttttagcaattttactaattgcttgaccttcttctaacatttctacaaccctatgataaataatacgtttttgaggatttttcgcattggcagaatataataaaggacggcctttatatacgcctttttctttcgcaactttaataccttgtgcttgtctacgtttactttcatttcgttcttgttctgaaaccattgctaatatttgaatgattagatctttcataaatttatctaataatggattgccaatcacttcattcatcataggtaagctagtaatcatcaattgaacttctttgtcttttaaataattaacggtacgaatcacttcatcataattacgacctaaacgatcaattgattccacgataaaccgatcccccattctcacaaagttaagtgcttcttgaagtatcggtctattctcaatagatttcccagattgtttttctgtaaatattttttcagcaccaaacgtctttaaattttcaagttgcctttctaaattttgatcgattgatgatactctcacatagccaacaatcattgatttccacctcacaattaatatacaccctaatcatacgttctagtcactataaattcaataattacatatgtgtgattagggtgtaccctaaatttattatttgtttaacttctccacttttttataacatcagtcatgcttatttcttcagtcacatctaaagttttccatttctcactccatatttcatgaacccttacattagatgacttaggtttcggggttctgttgcaaagttaaattaatatacaaagttatgcaaaagcagtaaattgtatactattatatcaacagattattcggttggattttattatttttcatttctttgtatctatattatatgattttcaagtttgcaacagaaccagtatttctatacaaatacactcttctattataggtatcaaaattccaaatgttattattgcaataattaaattcgaatgatcaactagattgtttaaactttcctggttatttggtataggaaaaaaagtagttagtaaataagttgttatttcgataacacaagaaagcttattataattaaagttacttcattacgttttaaaggtttgaaagagaataaattaaatttaaatacattacataatcctagagttaatagcaaacaaattatcaccattatgtaaaataaagttttgtttgctcacttgctaagatagatatattttcattaatagtatacaagatagaataaaacagattttgtccctagtagatatctaagctaggagaagttgggcattttattaaaatcaaactcattgttattattttttaatagttgtttagacataagatcacttatcggaagttatctattatccctcattcagagatgatataatatacaggtcgcctatctctcaggcgtcaatttagacgcagagaggaggtgtataaagtgatgcttattttcgttcacatcatagcgccagtcatcagtggctgtgcaattgcgttttttactcattggcttaataaacgcaacaaataattaataggtgacatttagccacaccaacaaaaatcccctcactactcgcaatagtggggggattggtgtataagtgaatacttattttcgttatttaaataataacactgattagtagaggaatgcaaaaatactactgtttaaatatatatcaattatattgattattaatatctggaaaattcacttcaacttcttgtttaatattagtaatattatctttaaaatcagtaattttatggattatttgttcgacaatttctctttcaacagggttatgaagagtagctaatgcttcatcatttgggatttctatattctctgaagtagtatacatttcattcataataactaataaattatctctagaaaggtcagaaggagatattttattttgttcaacgataaattgggattttccattatttatttctaagattttcataagtttctcctttttttctgtaagtttcaattcctgattccatagcttctacaaacttattataactagactctgaaacgcctaaattattggatatagagtttgaagaaaattctccagtgagtactttataattattgttttgatctttagttgttactattaggtaatcaggattgattaacgctcctaatgtagaattatgagtaactacaaaaacagtactctctctggataaattgtttaatgccggtattaattcgtcacgaatataggcgttgtcaagcgaagcttcaggttcatcaataagaatgataggtttatttttagattcttcgagtctcatcattaatgcaaaaccaactgcttggcctccagaagcaggggttccatctgaatctaataattcaacagttaaatttataaaataatttgctaaatcagatgttttataaaattttttcttttttaagttatttaaaaaagtgatgtaatcactttgtagatatggttttataatttcatcattcacagcttctctggtggatgcgacactttgaaattgtgaagcgttctcgaaaggagatattttaacaatgatttgatacccataaacgttttctcttttaagctcttgttcacaaattatgtttttcataaaagtatttatttgtttttccatctgctgcttttgaattatttcagagaattcacaatctaatactgttgtaactcctgttcttgattggactaattttttaacagattctagtatttcattaactctttctttaattttattttcttgttgcttttcaatatataagattctgagttcattatatgtttcgataaatacttgtttcttttcatttggatttttcaataaggaccaaaattcattactttgaataagactttttaaatctgttaaatatttttctaaattagcagtaggtattttatcaaactttgattctttatgtagtagatatttttcttttgaattacttaaattattatctttagcaaaatttttaacactttctaaatacttttcaaccacgccatcaaattcattttcatctctgtttaaatactctattattgtccgaaattgagattcatattttcttttccaaatatcaaatgcaaattgtccttgttcttttctttgtttttctatatactcgtctgctctagctgtttcgaattgagcaatttcatagtattcatcatcatcatattgcttttttatattttttaaaaattctgtttttccagttccccttttaccaactattaaattcatacctgtggaaaccatatgattattaatttctataacatctcttaaatttttttcgttaatatggatcgcttttttattctttatacaatttttgatttcagaaaatgtacaattatcaatttgtaaaaaagtatttttcatttttaataaatgaatgttttttcttttgggctcggggtcatcatctgcagcatgtgcatcactaaacaaaagaggtattaacatattttcttgattgtaaatagactggaattttaattgatttgctaccccaccagctattgtaatagaagaatttgataatttttcaggtactgacaatgaattactttttcccatttcaaaaatatatatgccattctcccaatttaccatgttattacaaaaatcttcggtacttatcgtgtctcttatttctaattcatttttagataaccagttagagaagttaacaaggttttcaatgtcctcttctgaaaatataatatttacatgtccttcttctaagcttaattcaatgccaggaaaaactgtaatatcgggtagatcttcttttacttttttaaaattttctaaatcaaataagtcatgattagtaattgctatagcatctaattcagcttcttcaacatatcttttaatccaatcagaagaatatgtaaaatcataatctttattactagatacggtatgaatatgaaaatcaatacgtttaaccatgtgtttccaccttttaaattattgaatgtatacatataaaaataataacatattttaagttaaaaaatttatttattttacactttacttttttggattaacggaaaactttcaagtacttttaatttacgtataatgaaactatattgataaaaaggattgtatattaattatgaggtggaaagcaatgatttttggctatgcgagagtatcttctgtcgatcaaaatttaaaaagacaactcaaaaatttaaaaacgtttggtattaaaaaatatttatagaaaaatagtctgggaaatttatcgaaaatagatcattacttcaagaagcacttaattttgtgagaatggaaggagtagaattaattgattgtttaggtcgtaattacgatgaagtgattggtaatccatcattagataaatttatgaaagatctaatcattcaaatattagcaatggtttcagaacaagaacgaaatgaaagtaaacgtcgctaagcacaaggtattaaagttgcgaaaggaaaagatgtgtataaaggacgccctttattatattcaactaatgcgaaagatcctcaaaaatgtattatttatcatcgagttgtagaaatgttagaagaagatcaagcaattagtaaaattgcaaaagaaatgaatataaaaaggcaaactttttataaaatcaaacacaataatgatttggtttaataaactttattttgatgcaaatgagagcttctcacagcgtttcaaaacaattgataattaatctattaggaacttttcaagaaaagatagcgtaaatatgttctttctctatattcttctactcattaaaattcgttattggaatactatttttcagtactgaaatcaacataataattagattatctatagaatttgttaccaatctgctaaaaacttatataaatataaagtgagaagtaacgtacgtttttcataaatttattaaatttttctatactaatcataatatagaaactataattattagcaatgtgcgaaattaattcatataataataattgacttcaacaaaaactaggctacttatatcctgtaagatacagagaattagcagcctagaacatagtttttttattaaatttccattttaagggttcagtgacttcattaacttgccatgttttttattatacaattagttaccaaataaacgactccaaaatccctttttaggtggttctattttcttattatcatcagtactactcttcgtttcttcaacgaacttatcctcttttgttaattcatactcacttgtactgtcatcctttttctcttcagctatattcttatgatttacttttgttgttgattgatattttgaggttcttcagtaaaatttacttcttgataattaatattctgtctatcattctgtcgctgaatcaaaagaataattaagctgtctttcttcttataattggctttttagtttttgaatctttttattactttctaatgctaaaacttattggttttctagaaatctgaaatcactacagtttaaattttaataatgaagctttaaagtttcaactactagaagaatcacctcaaagtattcaagctatttatgtaacttttctgtagctaaaattagtaaatctatattattaaatactaaagcattttctaacaattatattgatacgtatttcttattagaagataatgaaatacttcatgtacttaaacgttttaaagtcatgcaaggatatctcatgaaatctctcaaatctgaattcgcagaagcacatacttaaattaattatttaattaaatttttatatgcaaccaaattacctaatctttaaattacgtactcctgtaaaaataaatattattgatattataataagtaacattatacctactattatatcatttgaactttcaaatcccatagatgaatctataatatctaaaccaactctataactcaaagtggtaggtatcaaattagaaaatggtgctggtataagaatcagagataccatcgtaatacctatagttataactaatgagacaatataattattgaatatagtaactagagtaatagatagaggtattaggaaagttgttaagagtaagttaaggactgtaaaactaataataatcattactaaagattcagacaaaccgtcaaaaataaaatagaataataataataaaattaaatttaataaatagagaaaagtacaatataaaaaagatactaaaaattttgaaaaaaacaatttatacttatttttggaataagaaagccagtttaataaagtatggtttttaaattctatatagaatatagatgatccaataatacctatagctataggtgttatcatgaaatattgattataaaatctaaaataaaaaccatcaattaacgataaatctttattattaataaaaaaattagcaatattcataataaaaggtagtaaacttaataaaaaaacaattattataaatctttcacttctaattttaataatttcattttttataaaagttatcattttaaataagcctcctctaccttcatactcataatttttaaatatacttcttctaaagtcatttttttagcattattgtaatatttaactagctcattataatctcctaaaatataaaaacggccactactttttataattgaatattcattattaattttaaaatccaaattatttgtcctatcatttatttccacaagactataatgtcttttattatttctcaaatgagctatcagctttccattttgaataaaaataaaaacatcagtaaactctgataattctcttaaaatatgactagaaactatagtaacccttttttcgtttttaatttcactaattattatatctcttatatcttttattcccataggatctaaaccgtttgaaggttcatctaataatattaagttagaattaccaattaatgttttagctatacctaatctttgtttcattcccattgataaatttttaaattttttatttcttgcactatttaaatttactattgataataatttatctatatgtaatgtattaataccaagatacctagcatgtaatattaaattttcttcacatgttagattggcataaaaagcagggtaatcaattaagtgaccaatgtttttatttttttggaactctatctttccagaataatcaattacttctaagatagatttaaataatgttgtttttccggcaccatttggtcctaaaagtccataaacggtattttctataaatttataatttatgtctttaagaatattattatttttcaaattaactgatagactgtcaatcttcaacatagcaaataccaccttcttctatatttctaatcttaaaacattaggaatatcatcattcattaaatatatcaatccataggaaataccagacaaacctgttaataaatctatactttgaatatcttctcctactccacattttagatctttagcattaaaatttttaagtatatcaaatattatattccccattttttcacttgttggtaatatatcttttaatatcatcgcattacctaagtctccatgacacaagcaatgggttctagaaaaaccttcttcaaatattttttcaatgattttttttctatcattacttgtataattactcttttctctatttaacataatacctggagacccatgacaccatgcataaggaggtcttgcctcttgactatacggatgaggccaataatgttcaatgcgataagtctcttcatattgattagctagagaaataatattttcaatatttttatcatatttaaaattattgatatataaactcaaggcataggttataccagatactccatgagcaaagccaacagttacatcatcttcactgtcttgccaattaattaaattattattggttttatgcattttattgagtaaagtgtttactgataactcaatagcttcttcaatagtatttttgtaatctaagttatttactatatgatataaattaatcaaaattactagtactccagaaagaccgctgataaagtcagtatcattttcgactgaaattttccctttggataaatttatatatttaattgcagtatgtatatatttttcctttttagtctttttatacacaactgcgcataaatatatataagaatatatgccgtcataggctccaattggatagtctgtatagtattgaatttcttcctcaatttgtaatattaaattctcaacttttaaaagatattttttgtcttgtgtatgttgataaagagcccaataatataaagccataccacataaacctttatataaatttatttccattacttctctttcaacagttctagttccaggagtaccatataattcctttgtcatccaactatatgtattatttatttcaatttgctcttctaaaataatctcttctatagaacaaattagagagttgaatttttcttctttttcactagtagtatagtttttaacattgttataatttttaattgaatgcaacgtcatatgaggtatgaatgagctattatcttctcttaaagaatctgaaataatagaaatttgccatttcatatcgctctcattcaatttactaattttataagaaacactttcttttaatggataataaaaaaagttttcaattactttagtttcattaaataaatttttagatatcccattgtaatagaaataaggaatattcatatctattaagttatttatttcatatttagacaacctatcaaaatcgttatatagataataagcaataaataactttctcagagttatactctgaagtattaaaggatggaaacttaaattgagtatacgtgcatactgcattgttgcattattaatatatctaacattaacgtcatttatattattttcaattaaactataaaactcatttttattatattctataaaattatagcaatctttaaatccattaattaaattaactttatagtttttttcgttaacaaactcctcattaattttaggatgattttggtttgaagataacttaatataatctgattcaactctcatattagaagatcgtacattttttatagttggaacttttaaagaggaaagtccttcttttccacctaacccgctaaaatctgctccttcattattaccgaaaataaagggaagaatacccgtagtttttacagatgaagataataaatagtgattaaaataagtagcatctttaaaagaatttttactaagtttgtttcctatcacgctttctaaatccactaaaatcgggtgctcttgcgaggctatgagattttctgagtggaaatcagtagcacctaatacatatagcaagaacaaatgcatgcctaattcatagtaaaaattttcaatttgagtaatatcattacactctttataatctacttcattaacccaaaaataattctttttaactattatttccgtttttttaaggttacaattcaaggatttattaatataatctagtattttattataaagttgatctattttaccatttctcggtttgaaatagaatgatttatgtgtatatatacatttgattaccgattcaccttgattgtgagtatcacccaatcctaaactaatatttagtaaataatcttcattactatcaattaattctttttcatcttttaacaataattcaaaaaaattattgatatatttatctatttgtctaatattagcttccaaaaaaagtataagattataatatttattaataaattctaatctatagtttttttgactaagtctatttatatattcattaaattgttcctcttctgtagaagatttcaattggccttggcttctatttaaatttaaatcataaactattgttctatatgaaatcctcattaaattttcagaaatctgagacaaaatatccgaatttaacttattagctttattttcatcaatgttagacaatttttgtaatgcttttaaataatctaattttgaagatttaacaataaaaagcattaagtcttcaaaattatctatagaaaagttgaaatcatacttttcaaaatcaatcttattattattattattattattattaatttcttgattgattttcatctttaaatcttcaaattcagtatcaaaaattttttttgctactttctctaaattattagaatctaaatctttgaatattctggggattaaactattaatattcatcatttttccacctctaatattatgaaagactaggaattaaatttcctagtcttttgattattaaataaaaattagcaccaacaagttttagtaggacatatagaacattcccaagtaattgtacaatgtttcccatcattccctgttttttgagagaaagatttttttctaatttccgattcaccatataaatggatatttaggtcaccatcttttaattcttgtattaaatcaccggctgtattaaataattctaaatctttattactcatttttttcctccagactttgaaaaaattttataattgtgataaattttaaattgtagtgtacattttcatttatattttataagttttttcaaaaaaactcaatagctaggaggcactttattgaaacaaaatagtagaattactttagatgaattaaacaaaattactatgggaacttcagaggtaagaaaaggaaaaggaggcggttttagtaccgtaaccgttgtaacaccaattgtaccgacatcgaagtgtgcctcaattgtaaaaccatgtaacaaataacttttaggagatgagtaaaatgactaaaataactaaagatgatttgaaaaagattacagaaaatcgtattgaagcacgtacacatccaaccgttgttcctgtaagtgctgctgtatgcggagttgctactaaattagtaccaacatcgaaatgtgcttcaattgtaaaaccatgtaataaataattattaaaaatgcccccctttaatagggggtttttgggtgataaaatggactacttaataaaaaaaatatatgaagataattccgaaatatttgaatactttttaaacaacatctattcatcttataacgattttataaccatcgattttataaataatataaaaaaaaataactttttatattttaaaaatgtaataaaaagatatctagttgttaattttcaagatacatataaaaactctattaaagagagtgattctaatttatatttaaataaatatatgaaagagttcaatttaaatgaccatcatactttaaaagaaaacatgttatataaaatgaatttatatcataaatttatttttactattatcaaaaatgcttataatgatagaaaactattagttgaagataaaggcttaatagataatattaaagttgattttggagattctcacaatggagggcaaacagtagctatagtatattttgaaaatattaaatggatttacaagcctaaaaacttaaaaaaagataaattatatttttcatgcttaaaagtaataaatgataatttaaatgttaaatatagagaacctaaaataatacttcgtgataattatagttggcagtcttttattgaacatttaccttgtaaaaatgaggtaatgataaataattattattattctttgggaatacaagcgtgtcttttatttattttaaatgctaatgatatgcattttgaaaatctaattgctaatggagaatatccagtatttatagatttagaaactttattacaaactgatatagatttttcaaactctaatttagagcattatccttcaaatgataatgttttaaacaccttattgtttgatgtttctgataattcttcggttatggatcatattggcggatttactaatcgtaaaggcatgcccatttatgatattacaatgtttaataaagataatgatcaaatttctattgttgaaagtagcgagatatatactaaaagtacacctaatatcccattgaatgctaaaaaagagccagtagaaatttatgaaaaaaaagaaattttcttagagggatttaaaaatagctacaagactattcaaaataattttcataactttttaaatactttgaataaatatgaaaatctagagacaagaattgtattaagacctactactgtttatgcaaattatatagaatatttcaagcaaatggaaaatgaaagtgataacgaaatattagatattttatataatagtattccgttttataaaaagagtaagaaaatagcagaatatgaaattaatagtcttaaaaattttgatattccttactttaaagtaggattaaaatcaaaaaaacttacttcagtagatgataatttatatattaatgaattttttaaaaaaacaccttatgaaaaattagaacaaaaactttctcatttacataatgaagatttaaacagacaactctatttactgaaattgtctattgacgcatatagagagctgaatgattcaaaaaataatgaatgtcctaataaaagagaagtggacactactattcaacatgaaatagaacttattgagaagtatctagatactcaagatactgtttttaacatagagttaaatattgaaggaaaaacagctgtaacacctatttcttataatttatattttggtttaagtggggtatccctactatacttgcaatatcaaaaaactgctaataactatttttatagttcggttttcaatggtttatatgattcaatatatacaatgtggaaattagataaatcgattaactactctatatatcatggacgattttcttattttaagtatgtatatctattaaataactttttcaattttcaaatagatataaatattgaactacaaaaaactttaaaagactatatatcttatatcgaagataataaaagttatactatagattatttaggtggtttgagcggtattatctccttattattagatttttacaaaagtaacgataatcattcatatttaaaaaaagatattattttcttaacaaaaaagcttatagaaaatatttctataaaaaataatgaaatcgtagtgaagagcgatataactaatggttcaatgaaagctggtttggcacatggaacatccggaataatatttgcattagcaaaatatcaaactgaatttcatgatgacaaattaagtgatataatagaaagaatgataagtatagaaaataatgaattagctttgatcaaaaacaatgcttggtgtaatggcctgtctggaattgttctttcacgaaatattattcagaattatggaattagtaacgaattattaaatattgtatcgttaaaatctcagttattaaatggttttccaataggagtagaatcagtatgtcatggttctagtggtaattctttaattttgaaaactatgaatatcaacaaaaataaccaacatatactgtcttatgaatggacatccgggtatttattccccaatgaaaacataagcttcttcatgggtatatctggccaattgtttaatttactaaccacttcaaaagataaagatttaattgaaaaattattaatttaatagaaggtaggatggatgtgctaattcttactaaaaataacacagaaataaaaaattgtgtatatacaataacatgtaataataaaaaaacttatttagagtgcatacaattttctttaagaaataaattaagaatactttgtaaaataaatgaaatatatacatttcaaatttttggaattattccaagaaattataatatttatttaaaaagagctggagctgttatatccacatcttttaagaaaatacaaccactatcttcctctaaaaattatgtcgatgaatatactaatccaaaaaaaattcaatgggatgtcattagaacaacaaataattatgaatctcatagaaaagctaaaggaagccactcccatagtgttggaataatagactctgggattgatattaatcaccaggatttagtagataatattttatctatcagaaactttgttcctcaccaatttcctaatcaagatggtgagtttaaagtggatcctctttatatgaaagactatttagatcatggtacgcaagtagctggtcaaatatgtgcaaatggtgaaataactagtattgctcctaatactggtataaaaatatatagggtttttggagaaagagaaggttataatatttggattatagatgcaattattcacgctgcaaatgatggagtagacgttataaatttaagtttaggaagttatttgctagatggtgattacaaaaaaaaaggggagtggaataataataattctgaaattattgcctttaaaaaagctattacttatgcataccaaaaaggatgtgtagttgtaggttcattaggaaatgacagtataaatattgacgatcaaaagattttagcttcagaaatcgtaaataaaaaagacatttctgatatacaaaaaaaatctcaaatatatgattttccttgccagatacctaatgtatttggagttgctgccgcaaattattttgataaaatctcttcttactctaataaaagtaatttaaatttagatatacttagttatgctggcgattatagcttacttgaaaaatatggaagaaaggaatggttaaacaaaaaatatattactaaagattggatattaagtacatctagtgaaactgtttatacatatacaaccggaaactccttagctactgcaaaagtttcagcagctatagctgcaatgaatgattattataatattgaaaagcagccttcaaaaagtatatctttaataaaaagtaaatctaataaaattcttaatatgtctaatctagtttcgtctgatttaagataaaggagtatcaatatgtataataattatctacattttctatttactaagattaaaatccctaaaatgcagttattcatatcaatactaatatctactttaggcgctcttagtggtttaatgatacctttatttgctggaaaatttatagattctttttccttaaaaacaattaataaagatatgattatatacttattaatattatttatagttaacggtattttaatgggtttggggaattactttatgggtgtagtaggtgaaaaaataaattattccattaaaacagtattctttgataaaataattagactaaaattgccatttttcgatcaaaatgatactgggcaacttataagtaggatggttgatgacacatctataattaatgattttttatctaataaattacctactatttttccttctgttcttactttcgtaggggccatatttttcttattagttatagattggcaaatgacagttatttctttacttacaatgctaacttttattttatttattgttcctataggaagaatagttcataacatttcattgaaaacacagaatgaaattgctaactttagtactttattaaataaaatatttactgaaattagattggtaaaaacttctaatacagagcgtaaagaaacaaaaaatgctaatacaattttaaataatttatatagcttaggtgttaaagaagttattgttgaatcaataataaatcctatatctagtcttattatgttgcttacaattggtatcatattaagtgttggagggattcgtgtatctttaggcatcattacttctggtgaacttatagctatgattttttacgttttccaattatctaatccaataaatgaaatacttactttttttactgattataaaaaaactagcggagcaagtaatcgtatttatgaaatattccaagaagaagaagaagatatttacaattccttagaacataaaactttagataataatagtttgacatttgaaaatgtttcattcacttataataatgtttctattttaaataatattagttttaatatacctaagaatcaacttacagctattgtaggtccttcaggttctggaaaaactacgattttgaatattattgaaagattatatcctatacaatctggaaatatttattatggtaataaatctatatttgagataccactaagtacttggagacgaaatataggatatgtaatgcaagacaaccctatgatgaataaaagtattaaatacaatttattgtatagtacaccgaagtctttaactaatcatgaaatcataaattatactaagatgacagatagttatgatttcattataaacactatcaatggatttgatactattattggagagcgtggcattaaattatctggtggacaacgtcaaaggttagatttaacacgtaatttaattaaaaatcctcctctatttttattcgatgaagcaacatcaaacttagatagtgaaagtgaacagaaaatacaaaatgctatcgataatttgaatggaaaaaaaacgatagtaattgttgctcatagattatctacaatcaaaaaagcacatcaaattatttttgttgaaaataataaaattaccggtattggaacacataaaaaattattagaaaaacatgataagtatcgtatgtttgtaaatacacaaaatttatccaatttaaattcttaaatatggtatcataatattgaggtgatttaatgaaatttttagaattattaggtacactatttggtataggtatagtagttttccctttgtctgctttaggttttttaatatttgaattcaccaagcctgttgattctagatcatttttagtgtcagtattttgtatagctttatttgtaatttgtggctttggtttagtaattgttgctaatattatagaatgacttatatataatcaaaataataaaagcaagttctattgagatgatatagaacttgcttttattattttgattagcagctgtaggtatcttaaatcaagattgaagaagaaagagaaattgtaaaaaaattcaaactgttcaaaacttttaatcaatttatctttattgcgtaaactctcgatatcttcaaataaagcataatatatattggaatattttgagatactattttcaatttttttactgatatttttattaaatgaaaatacttgtttaagtacctaggaaacaaaatcaaagattctgaaaatatgtttaattgtagccgaataaatgatattataaaaacatacaaaaaaaagcaactactggaatagttgctcagtctaaagtggtagtagtcacttcaaacgcttcaattaggataagacaaaacaatgtctttttttattatgttgtaattacattatatatgtagtaagcaataacttcaagtataaaatacctaatgaaaaaagtgtctattacctcttgctaaaattaattaaatttaggaaagaggtttttattatgtcaattattaaaaatatcaatagtgagaaaccatttgaagttttacctagagaattattacaacaatgtgataaaaaacgtagtaatacagaaaataaacctttatcattacaagcaataggtttgttatgtaatttacaaagttacccagaaaattgggaaattcacaaaacagaattatataatcgctatgaaaaaaatggtcgtcgtcaaatacaaaatgcttggaatgaactcgttgacgcaaagtatattattcaatttaaaatacataacggtaataaattggattattattattactttagtgttactccaataactaacgaacaaataaaaaatttagaagaatatcataatagcgaaagtttagaaagatttgatttgaaagtaaaaactcctactgtacaaaatgaacagtgcagtcataacggactttctcctactgtacaaaatgaacagtgcagtcataacggactttctcctactgtacaaaatgaacagttcaaaatgaacagttcagaagtgaacagttcaaaacgtacagataatataatacacaataaatataatacacataaatataatacacataaatataatacacactacattacaaaaaacagtagtagtagttacaatatattgattgataaaattaaaaatgaattagttattaatattactccagcatataaaaatgaattagtgaaattattctcatattttgatgatgagattattaattatgctattgaatatgcgtctattaatggatctagtccaaaacaatttttattgaaagttttaactaactggaaaaatgctaatattacaactttagaacaagcacaaaatttcaaagtaagtagtaaaaaaaataacattgtccaattttctaaagagaaaacacctaaatggttacataataaaacagataaaaatacaagtgaagaattatctgaagaagaaaaggctaagtttgaagaagatagaaaagcatttagaaaagcattagaagaagactggaaagaataaaaagaaattgagatatttgtgttccaaatttatttattaaaatcttattatattattctattaccttgctttaaagattacatttaaaaacatgattatataggaaattggaagaataattaaacaacttttactgtatactatgactaggagtgtgattttatgaaatttttagaaatattaggaactatattaggtatcggtatagtggtttttccattatcagcattaggttttttaattacagagttcacaaaacctgctaaagagagaacatttaaaaaaactgttttttgcataggtctaatggtgatttgtggatttggattagttatcatcgctaatatattagattaaacaaaaaataaaaagccgatgtatcggttttttttagtgttcatgtgaatattaaaaaattgtggagtgatgacacatgaacacattcgttttcggcgtgattttaaagagattagaagaaaaaggacttaatatacacgaagtattcaatatgagcgataaacaggctaaaaaagacttatttgatgatttataccactatgtccgctatacaaagccatgtggtgcagaattaacgatggtggcattaaatgctgatgaattgatgcattactttgtatgctgttatatggaacgttatgcttacaaattgaacgcttaaccgttacgacattttgcaaatgtcgttgaactcaaaaaagaggtgactgcaggttctgttgcaaagttaaattaatatacaaagttatgcaaaagcagtaaattatatactattgtatcaacagattattcggttggattttattatttttcatttctttgtatctatattatatgattttcaagtttgcaacagaaccaactagatcgtcttggacgtacaacgaaacaattaattgagttatctcaatggttcgatgaaaacagcattgatttatatattgtcgatatgaacatatcaactaaagatgcgatgggtaaaatgttctttacaatgatgagtgcatttgccgaacttgaagctaacttattaagtgaacgaactaaaaaaggactagaagcagcaagagcaagaggccgaaaaggtggaagtccttcattacctgattataagaaaagagaaattaaatttttatacgatgagcagaagctcacaggtgaagaaattgctaaaaaaacaggagtaagccgttcaacgatatatagagtgataaaatagttttcgtataatgaagtgtagctactaagattgggagaggttctatggaaaatagtttaattattaatgatgatattaaagaggcatggcaaaatgttaaatttgatatagaagaattcaagtatgattcttctaaactcaaagatttaataaccagttattgtgggtcatgtttaggagctacgtatgcggcagatttagacaaagaatataaaaaaaacacaataaattattacagaatatatactttactaactagaattttaaattggtataaagataatttacacaaaattcaatcaaacgattttgtttatcatcctgaagaacatctcgaattcaaaaataaaatagaaaatttattatatcctatagaaaatttcatattacccaaaggtatgaacaatagagaaacaaatcagtatttttttgaacttaacgaatcgttatcagaagattataaggaggaagtcatggaggaatcagatttaaaatcaccatctttttttattagtcataaccaattagattcagaacaagcacaaaaaattgtcgtttttttaaaaagtttaggaatctctaaagaaagaatattttgttcttcagttgaaagtacaggaatcccaggagatgcagatattaatgactatataaaaacccaattaaatgataactgcttttttatatttttattaagtcataattactttaatagcttatattgcttaaatgaaatgggagcagcatggattaatattgaagaatcaaaacaacttgtattttcacttgatgatagcgtcgtcaactttatcaatcgtactgttttaaaatctactaaaaacagacttaatatagatagaaaaggattcacttctttaaagaccgttttagttaaaaatgagatagtagatgagttatcatcctcagattttgaagaaaagttagaaactataaatatttcttgagatgttacttaaaatattctttttctgcaatatcaattttgcattcttctccactatgatgttataatacctttaacgaagattatatgcatatatgcaccaatcccctcactatttgcggtagtgaggggattttttgatgcggcttaacgtcgccttctatttattgcgtttactactaagccagtaagtaaaatacgcaactgcacagccactaatgactggtgcaatgatgtgaacgaagatcataagcatattaagcacctccttccgtcaaaaataccgccggaagttaaggcgactctattattatatcatctgtaaacacgtaagcatatccacttccgataagtcattttatgttatatctttgcttatttttatagtatcaagacaagaagaaactcgtttcactcgtttcaaaaacccttctgatttttagagaaaaactctcttatttcatcgtccttaataaaataatatgccatctttccatctttataaaaatcaagcacctcatttttatataaaagtcttaaatgatgtgaagttgaagcaatactcattttcaatatcaaagaaatatcacaaacacacaactcatcttctttaatcaaagataatataattttcaattttttctcatcacaaattttttctaaaatgttaagtaatttcttagatttatcatcttctaaaaaacttaaagcattgttaactttatcctcatgtacacagatcacatcacaagcattttcataactcatatgaaatcacaccctaaattaaaatataaatcctaaaattgtttgaatagtgtcattttctataatgataaataaacctaaagctatataaataacagccataatccaacgaccaaatttctcaacaatttctccaactcctggaatattagctaatttttgtgcagtaaataccaagaagaaaattaaaattaaaaagacaaacaaagtaattaataaattagtaacacttaatgtcacaaaatagggaacaaataaaccgatattatcagcaccacaacttgctatcgtaacaattgcaatcgtaccaactaatttagacaatcctttttcattcaattcttttttagctctctcttctccgtcactatcaccataaatagccactttaattcctaaataaatcggtattaaccctaacaatcctaatatccatttttcaggaacataatttaagacaaaggcaaagaataaacttatgacaatcaatgctacagatcctacatattgaccaatataaatatctcgatattctttcctagtctttgctctagcaaagaacattaataaaatcactaataagtctaatgctgtcgcaatataaagaatagcagcagttacaatagtctgaatcataattacacctcattcaaaaatatttttgaatgtattataacttatttttttaaataatcatagttgctttattccaattgctttattgacgttgagcctcggaacccttaacaaatccaaaacttgtagacacaatggttattgatttacaggtccaaaattcatcgttataatctagttaaatcccgtaagggcgcacttatacgtcggataaatcgacgtgtgcaaaatcgtaatcgaccttcgtcgatttttttatttcaaaattaaagaaacggcttgagatattccgaacagttataaaaattaatttgtcttgaatattgctactacattcttgaaaaagtgatgtagatttatagcccataacttttttgaattccatcgacgatacggcgtcgaaagaaaaaagctatctcaattttagggtagcttttattttttatgcccttattttgaattttaaggggggcattttaaagaattagggataaatcatatagttttatatcaaaaacttatatacgctcttaaaacacaaatatgagccaaataaatatattttaatttcacaaataaaaatttgagcaaaaccagtgacgttttttagacattgcccagttatatgcaaattaaaaattgacataaaatggctcaaaaattcatcaacttttttagttcctgcaggggcagtttctttcaaaaaaacaccaaattttgaattggctccaaattctttgtaagagcataagggaaatttgctatcattttttatttttgtacccaagtatttttaacatatttttaacaaaaaaacgctacctttttgctaacgtttaagaaaatttgtttttatttttcttcttcaatttcatcaatcacttgatgattaatttcttgtttttcactttctgttaaatcaaaaaggtcactcgttaaatactcttttttattccaaatgtaaaaatatattgtcaaatcaccttcttttagaaaatgcaatttggcatgtttttcgttctattttatttctttagacagtctaaaataaataatactttgcttttcaattaacattttatagttaattaaaataattttgagtataatcatatcaatgaatcttattaaacactttatatttttttaattctctagttaataaaaagataaaatgatctttctttcgattcactttttaataaaattgagcatataaaagtatagaaattgttttattctttctctttttttgaacttaaaaataactaatatgatcattattggatttgatattgagaaaaacgtatttaatcaatttcaaaaagtgaaacaaatgtatgaattgcttagattacttttttagtgattttgttgttgaaattaatactaaaagtaggagtcttaagagtctttggttaaaaaaattaagactcttaagagtctcgacgtcgactgaagcctatgaaatcaacaaaaaaaagagttttcagacaattaaaagtggtcttgtaataattgtaaagagtctgtaataaagtatcatattacacccttcgattcaacgcataagaatacttataattacctttatataaagcttttaagctatttatggtgaacaattgagctgaacgaataaaaggtaaatctttcagctatgctgaataccaccgaagatggtactggatttccttatgctcatgtcaaatactctttaagaagactcttatgtttgtaatatttccaaaaacaaaacatgtttgaagacaaaagtggctatttttttcttcactttttactttaagtgcttattttgaaaataaaaataagcattgttagtaaaatgattgaagataaaaaaaagaaaactaagtaaaactatttacttagtttgagatagaaaaaattcaaatttaaaattacattcaacccatgtcttgaacattaacgacttactttttgtttatgatgtatatcaattgaatctgaattttgattttttggaataataaattcaacctttttttccaatctttaacaaaataaatagcaaaaacgattttattaagtcacttttataactacaaaagattgctaaagaatataaaaacggttagtatttttataatttttaaagttaaaacaacgttaaatgatcattttatttttcatcttatgcgacatgtttgagccattttcaaacgaataataaccgtttatagaaaaaataggactaaaacagaaatgttttagtcccacctacttgcttaactacagttcattttcagatttactcaattgccattgaagataaagttcgactgcagttaaaagaacattaatcattgccaataagcgcgagcgattcaacatcagtaagcgcaagcgactcagcgtcagtaagtgcatctgattcaacatcagtaagtgcgagcgactcagcatcaacaagcgcatctgactcaacatcagtaagtgcatctgactcagcgtcagtaagtgcatctgattcaacatcagtaagtgcgagcgactcagcatcaacaagcgcatctgactcaacatcagtaagtgcatctgactcagcatcagtaagcgcatcagatagtgcgtcactaagcacaagcgtgtctgattcaaactcaatgagcgcatctgactcagcgtcagtaagcgcatctgactcagcatcagtaagcgcatctgactcagcgtcagtaagtgcatctgactcaacatcagtaagcgcaagcgactcagcgtcagtaagtgcatctgattcaacatcagtaagtgcgagcgactcagcatcaacaagcgcatctgactcaacatcagcaagtgcgagcgattcagcgtcagtaagcgcatctgactcaacatcagtaagtgcgagcgattcagcatcagtaagtgcgagcgattcagcatcagtaagtgcgagcgactcagcgtcaacaagcgcgtctgattcaacatcagcaagtgcgagcgactcagcgtcaacaagcgcgtctgattcaacatcagcaagtgcgagcgactcagcatcagtaagtgcgagcgactcagcgtcaacaagcgcgtctgactcagcatcagtaagcgcatctgactcagcgtcagtaagcgcgtctgactcagcatcagtaagtgcatctgattcaacatcagtaagtgcgagcgactcagcgtcagtaagtgcatctgattcaacatcagtaagtgcgagcgactcagcatcagtaagcgcatctgactcagcgtcagtaagcgcaagcgactcagcgtcaacaagcgcgtctgattcaacatcagtaagtgcatctgactcagcgtcaacaagcgcgtctgattcaacatcagtaagcgcgagcgattcaacatcagtaagcgcaagcgactcagcgtcagtaagtgcatctgattcaacatcagtaagcgcgagcgattcaacatcagtaagcgcaagcgactcagcgtcagtaagtgcatctgattcaacatcagtaagtgcgagcgactcagcatcaacaagcgcatctgactcaacatcagtaagtgcgagcgactcagcatcaacaagcgcatctgactcaacatcagtaagtgcatctgactcagcgtcagtaagcgcatctgactcaacatcagtaagtgcatctgattcaacatcagtaagtgcgagcgactcagcgtcagtaagtgcatctgattcaacatcagcaagtgcgagcgactcagcatcagtaagcgcatctgactcaacatcagtaagtgcgagcgattcagcatcagtaagtgcatctgactcagcgtcaacaagcgcgtctgattcaacatcagtaagcgcgagcgattcaacatcagtaagcgcaagcgactcagcgtcagtaagtgcatctgattcaacatcagtaagtgcgagcgactcagcatcaacaagcgcatctgactcaacatcagtaagtgcatctgactcagcgtcagtaagcgcgtctgactcagcatcagtaagcgcatcagatagtgcgtcactaagcacaagcgtgtctgattcaaactcaatgagcgcatctgactcagcatcagtaagcgcatctgactcagcgtcaacaagcgcgtctgactcagcgtcagtaagcgcatctgactcaacatcagtaagtgcatctgactcagcgtcagtaagcgcgtctgactcagcatcagcaagtgcgagcgattcagcgtcaacaagtgcatctgactcagcgtcagtaagtgcatctgattcaacatcagcaagtgcgagcgactcagcatcaacaagcgcatctgactcaacatcagtaagtgcatctgattcaacatcagtaagtgcgagcgactcagcatcaacaagcgcatctgactcaacatcagtaagtgcatctgactcagcatcagtaagcgcatcagatagtgcgtcactaagcacaagcgtgtctgattcaaactcaatgagcgcatctgactcaacatcagtaagtgcatctgactcagcgtcagtaagcgcatcagatagcgcgtcactaagcacaagcgcatcagattcagcgtcagtaagcgcatcagatagtgcgtcactaagcacaagcgtgtctgattcgaactcaatgagcgcatctgactcaacatcagtaagtgcatctgactcagcgtcagtaagcgcatcagatagtgcgtcactaagcacaagcgtgtctgattcgaactcaatgagcgcatctgactcaacatcagtaagtgcatctgactcagcgtcagtaagcgcatctgactcagcatcagtaagcgcatctgactcagcatcagtaagcgcatcagatagtgcgtcactaagcacaagcgtgtctgattcaaactcaatgagtacatcagacagtgcgtcaaatgtcacttcgaatgcaacttctaatagtgcatcaattggagaaagtacaaactcatctaatgtagtgcaacaatcaaatcacaaagataatagtgatgagaacaaagaacttcctgaaaccggtaatagcaatgactctaataatacaaatgtattaatgggagctgttctttcattacttgctggattaggtttaatgaagagatcacgtaaaaacaaagaagataaaaaataacaatagattttaatctataataatatgaagtaaaacaaagaggctaagacataatattgagtttacgtgatagtaaatcaactatgtttttagcctctttgcactcatattaaaatttaagaattttaggtgaaaaaatgttaagaaataaagaattcaaagttttgcataaaagaattatttttacaatactcattcttgtcatatacatactaggaagtaatatttctatcattggtaatgaatcaattaaatttaaccatgacagtttttttaaattagctatttcaaacgtcggtggagatttaaactcattgaatgtattttcattggggttaggcccatggttaacagcaatgattattatcatgttattcaactatagaaatgtagataatattgttaagcagactcgttctgaaaagcaaataaaggaaagactattaacaatactcatagcaacgatacaagcatattatgttatccatacctatgttcagaataatataatacagagcacaaatattctgttacttgtattagttttactaacagggacattatttttggtctggttggctgatcaaaatactacttatggaattggtggaccaatgccaattgtattaatgagtttaataaaatcgttatttcatcaacaattatctaatataaatataacaacaacattatttattgtgattggtttattaattatagcgatgctaatacttctctatatagaattatcagagtatcggcttcattataaagatataatgaacatggctacacaaaattcacattcatatcttgcctggaaattaaatccagcaggaagtatgtctataatgataagtttatctttgtttctattgttaaatagtgttattaacttaattggaaacttacttctgaataaggaaatgaatgtagcaatttttggttttgataatcctgtaggtattacagtatatattgtaatacaaatcatttttggatacttactatctagatttttgattaatactaaaaggaaatctaaagaatttttaaaaaatggaaattactttgtaggtattaaccctggtgaagaaactgagcgatatttaaataaaaaagcaagaagaatttgctggtttggttcaattacagtgacattgattttagcagtgcccttgtattgttcattattgattccagagctttcaaaagaaatatatttttcaatacaacttattgtattaatttatattggtataagtataaccgaaacattaagagcatattcttattttgatagatataaaagcatattagacaaatattagggaggaatttttaatgagatattttataccggcgtggtatagtagacaaaacttgtggaaagaccataccctccccttctattataagccggataaaacagagtttgatgacatgattagcttaatgtctatgcataagaaaaatggttataaatataaggtgctagtattaaattattcacctaatttaaggttgtttttacatagacacgatttatttgaaagtgattattggtctgtttttgatgtgttacaaagtgctccaaacacattacctagagctattgattatttagatttgaattggcctaaagacacagagtttgtatattcaccgtttatggtagaagcagttataagcgaaaatacgtattctcaagttacgtttaatcaagagggatatgtacttcatatacatgaatatgaaaatggattgcaacaacaaaagatgatatttgacgatagaggatttatatcttcaattattaaatatgaaaatgataatgaggttaaacaaacttatttaaatgtattgggtgaaaagatactgactgaggacttaataacaggagaagtattagttaataatacagttaaaaacttattagaccatagtaaatatttgaatatgttggaaataatagaagagattgttgaaaaattttataaagatcaaataacattatcagacaattttattgctgcttctgatgaaagacataatcagttaatcacacgttattttgaagcaagtcaattatgtttttctctattttcaaatagaaatagagaaataacgccacatttaattcactccatgcaacctgcaaaaagttgcttagttgacacaaaagaaaatgaaagagaatgtaatcttattgctaataacaattcaattgacatgaaagtgtctagaattacaccctttgatactgaaaaaataccaaatataagttcacagttatataatgtgcatattggtttttggatagataatttatcaagagatgtagtagagcctacaataaatcaattatataattatataaaaaataaagaaaactataaagttactattttaatgaaagatataacaagcaaaacgccgaaatggttatcagacatagtaaaagaaaaaaatgaattatataatgaagaacaaaaaactttaagtgaagaaatggctgatgtgttagaagaagaaatagaatttatagaaataattaaaattgaatcagtcttatttgaagaagatttaattagaacaatgtcacaattaagagtagttatagatttgggtgatgaaccggatttatatctacaaattagcgcaataagtgcaggagtacctcaaattaatatgatagaaacggattatgtgacacctaatgtaaacgggttaataataccaagttcatctaatattacacaggcactagattacttcttactaagtttgaaaaactggaattattcttatgcatcttccataaaattagtagatgaatttagttcgactaagataataagagaagtggaccgtttgataaaaggagagttatatggctagaaaatttaacatattgcaaatcggcggagaagatttagaacctattttccatgataaaaaaaacgtgtacatcgattatcttgattcaatactatttacatttgaaagtggatatgaagaagcaattgaaaatttaatagatgaagttggttcctttaatttagtatttattcaaacaacgtattctcaagaattgatgaaagttattgaattagtaggagagccatatacgatttatgtagatgaaaaatactggaattttcaatttgaaaatgatcctcgagtaaaatataaatttattaaaccattactttataaatcaacagatgagttgcatcataaattaaaagcgggtgcttttactaagcaatacggagataaagtctttccaattaaaggagaggtaagtcctagttttgaaggagaatttgaatacttaggtaacaaggagctcgttttatctggagattttggggagtcatatacttcaattgttagctggaaccaaaatttagtttatgataagaatatgatggtacaattatggccagaattttttgtagagggaaatgttgatatccaatatgtcattagattaatcccatttggctcattagaacatacaaaagatgttataaccgtaacaaaggatgatttaaaacaacctttggaattgatgccaagaccttatgatgcaaacatttctatagtggtaaaagctaaggggacgggtgttgtacatcttagggcaatccataaacgttggtctcgtgcagaaatgggccaatttataatgggtggtcaacgttataacgatgaaaatggcgaagagtttatacactatttcaatcctggtgatttaaagcctccactaaatgtatattttagtgggtatcgttcagcagaagggtttgaaggatattttatgatgaacagtctagaagccccatttctacttattggagatcctagaatcgaaggtggatccttttaccttggctctgaaacctatgaaagtaacataaaaaaaattattaaagaagcattggaatatttaaattttaaagaagatgatttgatattatctggattgtcgatgggatcatttggtgcattatactatggttcacaattaaacccaagagctgtgattgttggtaaacctttagttaatattggtagaattgctgaaaatatgaaactaaaacgacccaatgattttggaacggcactagacattttgatgtcacaagcaggcacatttagtaaacaaaatatcaatcatttgaataagcgtttttgggaaaaatttaagcaaaatgaagttgaaaatactacttttgctatcgcatatatgcaaaatgatgattatgatgatatagcttttgatgatttaatgtctttgctaggagaatccagaacacatgtcatgacacgtggcgttcctggtagacataatgatgattcggcaactataacaagttggtttgtaaacttttatcatattattttaaataatcaattcgggagagagtaatatgaaccaaaacaatcgatttgatatcacctggacaaagatacataaaagtacttttatgtatggaactaagctaaaatttaagaacaattttgtcagcatggacaattcgttgatgccctcaggaatggtgatacatgaatggaacatgttatcaagttatacaacaaataaacaagtgccttcattaccactattgaaaaaagggaacaattataaaattaattttgattatgatgtcacacctgaaagatcagtgtattttaaaattgttttatctaaaaagaatggtgaaaaaattaaaactatgattatcgaagatgatgatattgagtttaaatatccaaaagatgcctattcttataagattgaattaatgaatgctggatttcagcatttacaatttcgccgaattattattgaagaccaacatatagagagcagtcactcaactatatcaactgatattagtgaaatgatagataaaatcagacacaataaagtataaaattcagaaagaggtgtcataatgacaggtaaatttgataatactattaataaaatgcggttaaaaaaactaaataaaacattaaatagtatcaataaaatgagtcatgttttttctgaatatactgatgaagcattaaaagcaaaaactcaagaatttaaaaagagaataatggagtctaaagcgactttagatcaaattttgccagaagcatacgctgttgtaagagaatctgcctaccgtgtactaggcatgtaccccaaagatgtgcaagtgctaggagctatagtaatgcatcagggaaatatagcagaaatgcaaaccggagaaggcaaaacgctaactgcaacgatgcccttatatttaaatgcattaacaggtaaaagagcatttttaattacgactaatgattacttagccaaaagagattgcatggaaatgaaaccattgtatgaatggttaggcttaactgcatcattgggatttatagacattccagattatgaatatgaagctggtgaaaagcaaaatctatatgcacatgacatcatttatactacaaatgggcgtttgggctttgattatcttacagataatttagcagatcacaaacgtactaaatttttacctgaattacagtttgcaattctagatgaagttgattcaatcattttagatgcagcacaaacaccactcgttatatctggtgcaccacgattacaatctaatttatttgatattgtaaaagaatttgtacatactcttaaagatgggcaacattttaaactagacaaaaataaaaaagaaatttggctaacaaaacagggtattgataaagcaagtaactactttaaagttcatcatttgtatgatgaaattaattttgatttggtccgtattatcaatttatcactgagagcaaagtatttatttgattacaatttagattatttagtatcaaatggagagattgtgttgattgataggattacaggtcgaatgcttccaggtacaaaattacagtcaggtttgcatcaagcaattgaagctaaggaagacgttgaattatctattgataagagtgtgatggctacaattacatttcaaaacttatttaaactctttgacaaatttgcaggaatgactggaacaggcaaacaaggagaaaaggagttttttgagttatattcgaaaatcgtagttgagattcccactgacaaacctattcagagacaagatttagaagatagagtattcgcaaatatggaagaaaaaaaccaagctatcattgattttgtggttgaaaaacataaaaaatctcagccagttcttttgataactagaactgcagaagcagctgaatatttttcagctaatctattccaattagatatacctaataacttattaattgctcaaaatgtttctaaagaagctcaaatgatttcggaagcaggcaatagagcagcagtcactgtggctacaagtatggcaggacgtggtacagatattaaattagcagaaggagttcatgaaattggtggtttagcagtcatcattaacgaacatatggaaaatagtcgtgtagatagacagttaagagggcgttctggtcgtcaaggtgacccaggggtatctcaaatatttgtttcattagatgattacattgttaaaaaatggagtcaatctaaaatgatagagaacgacaagttgaaaaaaattaatagtgaaattttagaaaatagtaagattttccaaatgaaagttaataacattgtaaacaaagcacagactgtttcagaagagacatctattgttcaacgtgagatggctaatgaatttgaaaaaagcattagtgtacaaagagatttaatttataaagaaagagaccgtattttagatatggttgacaaaaaccaatttgattataagcaattagcgaaggatgtttttagaaacgatttaaaaaattttaatataaatgataaaaaagacataattagctatatctataaaaatctatctttcaactttgaatcgaataatgtaaagatagatgtatttaaccaagaggcaattgttaactttttaatacaacattttatacatcaatttgaggataatcaaaagaaagcatcagatccatatttcatattacgctacatacaaaaatcaattattaaagcaatcgatatggcatggattgaacaagtagattatcttcaacaactaaaagctaacgttaataatcgtcaaaatggccaaagaaatgccatatatgaataccataaagttgcattagaatcatatgaaattatgactatgaaattaaagcgaaatattataaggaatttgtgtttaagtattattacatttgataaacatggagatcttgtgatttatttcccataacatataggggggttacgatgactgtatataatgtgaattttggcataggttgggcaagtagtggtattgaatatgctcaagcatatagagctaaattattgagacagttgaatagaaatataaaatttatttttttagatttcatatcttctgaaaacatccaaacattgactgataatctaggatttaaagatgatgaagtaatttggttatatcaatattttagtgatataaaaatcgcaccaacaacttatactttagatgatttaataggtgaaatcggtaacgaaattacacatatagaggataatggcaaaatcaaaagattgtattttgattatgataaaagttcattttcaacatgttatatgaaaaatgcagataaaaattatgtggatagagtggagtttgtcattgaaggctatttagtaagaaaagatttctttagttatacgagagtgttttctgaatattatgccccttatcaaaattatgccaagatatatatgagacagttttacaatgaagatggaacaattgcatataaggaatatatagatgataaagaaagtgtctttgtctttgacgatgcacagttctatagtaaatcagaatttgttgcatatttcatgaataaattaaatttatcaaataaagatatcgtaatcttagatagagctacagaaattggtcaagcagtattacaaaataaaggcgctagcaaattaggtgtggtagttcatgcagaacattttagtgataatgccaccgatggcgataatatattgtggaataactactatgaatatcaatttagaaatgcaaaatttgtggacttctttattactgcgaccgatttacaaaatcgtattttaagtcaacatttttctaaatatacttatgataatccattaatcagaacagttcctgtaggtagcttaaatcaacttattcatccagagaaaaagagactgccatattcaatgctaacagcatcacgactagctaaagagaagcatgtagactggattgctaaagcagttgtgaaggccaaaaaagaaattcctaaattaacgtttgatatatatggtcaaggtggagaaaaaaataaaatagaacaaattgtttatgaaaataatgcgcaagaatatattacattaaagggccatgttaatttgcaagatgtttattcaaagtatgaattatttgcatctgcttcacaaagtgaaggtttcggtttgacattgatggaggctgtaggatctggtttaggaatgataggatttaatgtaaattatggtaatccaacatttattcgtaatggtgaaaatggatatctgatgtctgaaaatgtagaatctgcagatgaagaagagaagattaatgaactagcttcatatattgtgaaatattttaaaaatggaccaaaaaatccagaacgcacatcatatgaaattgctagcgaatttttaactcagaaaatagtagaaaaatggagtatgctaattaacgaggtgctacatgattaatatatttgataattatcattttaattcacaattattacatcgttcattgaaacttgcagggtatcaacatttgacaatttgcttagaggatgatggctttttaccagatgatgttacctctccttaccaatttttcgctcaaaatccaattaaacaaactgataaacctttattctttaatgaagtagaggtgccaacccactgggaaattacaggtacaaatgatatgggtgaaataaaaaatttaggggaaataagaggtaaaattttctatcaatccaatttcaagtctcgtattgtaaaccgagttgagtggttggataataagcaacgattacgcatagttgatttctacaataagaaggggtttaaatttgctgaagctatttatgatttaactggtaaagctataatgaaaaagtactttgatcacctaggcaaagaaattatctatgaaaattatgtgactggagactacgtattaaactggaaaaacaagacacactttttcaagtctcaagaagcatttgtcatatattacttaaaacaactaaatgtagatttggatgtaattatctttaattcactagcgatgccttttatcgcgttatatagaatgaatacaattggaaagggaattctcgtttggcaagaaaatagtcatggaactattccaggaaatatgaaacttatgtttgatgaatcgttaaatagaaattattcaatcataataccaaatagagatgaatatctaaaaattcgccaaggactttgtgataaagaacgtgataaagtaattagaggtggctatctttatagttaccgaaagcaaaaccaatttactagaaatatattaactttaacaaattccgatcaattgctctgtattgaagaattagtaaaaagtaatagtgaatatcaatttcatatagcagctattacagaaatgtctaataggctattagatttaatgaaatatgataatgttcgattgtatccagtggcgaatgaagagacaattgaatcattatatcaacgatgtgatatttatttagataacaataaaggtaatgaactattgaatgcagttggtcgagcatttgaaaatgatatggtgatatttgcaacgcatgatgaagcacataatcgtatgtttacagcgcctgaaaatattgttatgaaaaaagatattaataatttgacaacaatgttgcaaaaaatgtctaatagtaagaaaacatatctaactagattacaattacagaaaaattattcaaatgaaattgaacctgaaaaactcattaataaaattaaggttatgttgcaaagttaattttatagtatgattttaacgaaaaatagatataagcaatttaataaagaaataatcactgtagtcattggctactactcatctattatgtaaagtaaaaaaagagagcgtatttgctctcttttcttgttttgttattaaaaagctcataatagattatgatcatctgttttgggacgctgtgagaggctctcagtttcatcgaagtaaagtttattaaaccaaatcattatcgtgtttaattctgtaaattgtctgccttgttatatttacttctttcgcaattttactaattgcttggccttcttttaacatttccaccacgcgatgataaataacacgtttctgtgggtctttagcattcgctgaataaagtaacggacgccctttatatacacctttttctttcgcaacttgaataccttgcgcttgtcgacgtttattttcatttcgttcttgttctgaaaccattgctaatatttgtatgattaaatctttcataaacttatctaataaaggattgccaatgacttcattcatcataggtaaactagtaatcatcaattgaacttctttatcctttaaataattaactgtgttaatcacttcatcataattacgacctaagcgatcaatcgattctactacaaatctatcgcccattctcacaaagttaagtgcttcttgaaatacgggtctattttctactgactttcccgactgtttctctgtaaatattttctctacgccaaatgttttcaaattatctatctgtctctctaaattttgatctatcgaagatactcttgcataacctataatcattcattttcactccaaaattaatatacaccctaatcatacgttcaagttactataaattcaataacttattttgtgtgattagggtgtactcaaagtgtacatatctataattaaaacttactaaaaataaatatagattttttctttgtaacagaaccgttcatttgaaggtcatctctatcataaatatttaaattaactaaaaattttaatcatctgtttaatacttatgaaatgtatttacggtaggtattaaaattgatgaaatttatataagtgctttcaatgaaaatgaccgtttatttatcctcctgatttaaggagttagaaatttcgaaaacgattctttccatttgttgcatttgttccatgtccagatatttaatacattatagaaaaccaaagaccatcactaattaaacgcagttttaaaatttcatcaggattgccttcgtctttaaaatgggcctcttttaatataagttctactctttcatacctaactctttcaatgccatcgtttcatacgccgattctcctgattccatagcaaactcagcgataaacattgggaatactgcattgagttctattatatgctctttcattcgtggccatatttcacctccagctttaccgtatgctgttataagttgctctaatccttcgtcgtcgaatacacgatggtgtcctataaagtccattgatgggtcggagtgggttgcttaagtccagtctatgagacctgtgacgtttgcttggttatctaccattatatgtcctggatgtaagtccccatgtatcattgtcgcatgtcgaggccatagttcgtcgttttctaaccattgtttccatctgttccataattcatctgatacgccataagtttctttaactttattcattcttctttgaaagtcattttttatttcttgtatggttttgatatttatatgctgaacgttaatgttttcttctggtatgttgtgtaaatctacgagtgtttcagctaatgtgttaataaagttttctggtaatggtttgtgttcaatttcccatacataattttgtatttctggatctattgtggctgcgggtttacctgtaagttttgggtaagcaataaggtcttttgcatgtactttccacttcggtatttcaaatgaaacattcttctgtaagaagtctaccgtttgtttttcgggttttgttcgtttataaacgtcaggtcttcttggtagtctcaaaacccattctactccatgtttatcttttccaaatgcaacttgaaaatcaagtcccgattcattcaatgagattgtttgaggttggatgtgtaattgatatttttctgcacatttaataatttcattatgtcgagtcattttattggatccttatttctattatatttttcttgtgaacgtattttttatattgatataaatgaacctaatattcaatataaattagtgtatagtttttaagttatatcatgaatagattgtcctgttaattcccattttttatctgatacatgtttaacaaaccttgtatcatgtgatgtaaacaaaatgattccaggatatttattcataaacatttctaatgcttctaatgttttaatatctaaaaaattagttggttcatccaaaattaacatattcgctttcgttgaaaataatactgctaacgataatttcgttctttccccaccactcaaaacattacaagaacgatcaagtgcttcatttaaacccaagttatttaaaatagctctactgaatgattctgatgaatccgtttcatccattaaatattgcaataatgaaacgtcacgcatgtcttcataagcaagttgacgatagtatgccatttgcactttaggagaacaatcaattccctctatttggtggtaaatagcttcaagtaaagttgtcttacctacaccatttgcacctacgagcgctatatttttgccatatggtatttgaaatcgtacttgtgttagcagtttttgacttcctttaaccaatgttagattttgtgcaatgattggataattattatggatatcataaattttattttgtgggaaattgaattcatgataactttgtggtttttcaacttcttccaaatgttccattcttttttcaatatgcttagcttgtttttgagcagccttctcaaccgtgcctttttgttttgatgcacttaaacgatctggtgctatacttttgtttttttgttttgatgatgcttgtgccatttgttgcgcttgatttcgtttagctttactggcttgggacaatctttgtttttcacttatatactgttcatattgacgttgttgttctaactgttcttgttcatattgattttgatactgtgtgtaattacctttaaacactcttattgtgccatcttcttgtatatcccaaattgtgtcagcaatttggtctataagtgctctatcatgacttactataattaaagtaccatagtaatattttaaaatatttttcagataatctttaccaattttatccaagtgatttgtaggttcatctaaaagtaatatcggactataatttgatatgacattagctaatttatattttgctttttcaccaccactcatactgtcggttgtatgcataggtatatggagttcactcattaaactaccgtctaacgtgttaaaatcattttccacatccatgttaagctgttcaaaatattgaatttcgccaaccgtttcaactgttccagattctggttttgttttttgagcaatcatatttagtaatgtggttttgccagtaccattacccccaataagtgctattttttcaaattggtaagcgtaaagatgaccgatgttaagtgatcgtaaatctgtcaatttatgattgatttggttaaatttaattgtatattgttccatatttatacactccttgtatatttaaaggacgtgtacgcaaaaaaatgagacaggctactcccgtctcattcacattacactttcaaacacttaaaaatttattatgatgttttagtatttgaaagcgtttattattcctatcgaaggataaaaaatgacataagtcatcctatgagtgtgtattgcggacaagcctttttgaattaatttagttttgtattcaaaaaggtttatttgagtctcatagaagctgtcattttaatcctccttcatcgataaaatagtaatgttaatataacattttgttggtttttttacaatatatctctaagtagaaagattatataacaaaagtataaaaatacaattttagattgattatacatctccttaatttagagtgtacttaaaatatacatacaccttaaatatttaatttttcaataattatacttgtttagtttattgttggttctgtttcaaagttgaatttatagtataattttaacaaaaaggagtcttctgtatgaactatttcagatataaacaatttaacaaggatgttatcactgtagccgttggctactatctaagatatgcattgagtattatatgcacataccataaaatatcagaaaaggctttaaatcaagaaaagtacgaggattttgtaaaaaatggcgattttttcacaaatccagtcgatgttgaaaaatcatagacagttttattgaatgtgttgtcagaaatttagtaaaatatgagtgaaatcaaaaagcaggaggcagttcaaatgacacatattgagctagactatagcaaagctttaaaattcgtcgacgaacatgagttaacgtaacaacaagaaatcgttaaaacaatccaccgtgtaattcatgaaggtactggtgcaggcaatgactttttaggatggttagaccttccggtagattatgataaagaagaactctcacgtatcttagaagcagctaaacgtattaaagaacattcagatgttttagttgtagtaggtatcggcggttcttatttaggtgcacgtgccgcaattgaaatgttgacatcatcattcagaacaagtgatgaatatcctgaaattgtctttgcgggcaaccacttatcatcatcttatttacatgacctatagatatgttcttgcctggactgccgcaaatcagagcagactttaatacaaccgcatctgaatcgcaattaaccttaactttatttatggtgtggttggccttcggcaacctgatcatgggacctttatcagatgcttacggcctcaaacagcctttagtcattgtaatggtgatttataccatcgcaagtatcggcattgtctttgccacgaatatcaccatgatgatcagtttaagatgagttcaaggttcatgtgcaggtgcagcagcagcgatttcacgtgcgattgcgagtgatatgtatcacggcaaagcactgacaaagttcttagcagtattgatgctggtgaacggagtcgcaccggtcatcgcacctgcaatcggcggggtagtcttgatgttttcaacgtggcatatggtctttattttgatgacgattttcggtgcttttatgatattttgtaccacagtgcgtgtaccggaatctttaagcagacagtctcgtcagagtaataatcgctaacgacttggtcatattcttttaatgcatctacttttgatgatttatcttgattgtattgattttcatggaacactgcttcaaatggcaaacgcggtttaggagaaccttgttcattatctgcaggtacaccgactgccataccgaataatgggaaagtatatttaggcaagttcaataattctttcacacgtgcaacgttattgcgcagagaacctaaatacacaatacctaagtctaaactttcagccgcaactgccatattttgtgcgagcaatgcaacgtcaattgtacctactaataagccttctgcagactcgaaagaactttgcatatcgccttgaacttgttcattgattaaatcatggcgatgataatccatcacaaagacaaacaagtagccgttctcttccacataggcttgacctgatatttctcgcaatgcctttttgatttttggatcagtcacaccgataatcgaatatgtttgcaagtaactggatgttgaagcgctttgtcccgcttgtacaagctgcttcacagttgcttcgcttaaaggttcttgtttaaatcgtctgactgaatggtgttttttcattaattgttcaattacatctgacatagattttacgcccctatctttccaaatgattttaacactcctattttacccttttttcatgaggcttaaaaagttaatgctttgaaacttaatccgaataaagttatcctaatactataaatattctgactaaagggagagactttaatctcggctatttgccaaaaggcgataaacatatcgtgacgacatcagaaactacgattcaagcaattgaagcgatattcgaaatgctttcaacagaaggcattattgtcttagtcatctatccaggacatccggaaggacaagtagaaagcgagacagtttttcagtatcttcaaaacttcgatcagcaaaaagcacatatattgcagtacggatttattaatcagcaaaataatccaccctatatttgtgcaattgagaagcgataaacaagtattgaagcaaagaaatctacaaaaagatcaaaaaacaagagccattaccgtgttaaagcggcaatggctcttgttttatatataattagttgaataatttatctacacttttagttgtttcttttaatacacttacagagtgattgaactcttcagtttctttttcatttaaaggtgtttcataaattttaacagcgccggcacggttaactaatgttggtacaccgatgtacacatctttttgaccacattcgccttctaaataactagatggatccggcgaccaccgagatctacacaaggagtatcgtcggcagcgtcagatgtgtataagagacaggtatgtaagggattatagctatttttcttgttgaaaggaatttttgacataaaaaaaccccagtagtatgattaaagcgtctactcaataaacaactactggaggtctctttatatgcaatataatactactagatgtatagacgaaaatcaagataacgaaacacttaaagatatgacgaaaagtgggaaacaacgcccatggagagaaaagaagatagataatgtaagttatgcagatatactggaaattttaaaaataaaaaaggcttttaatgtaaaacaatgtggtaacgtcttagctgtctcttatacacatctccgagcccacgagaccagagaggatctcgtatgccgtcttctgcttgaaaaaaaaaacacaaccacctatattgctacataaccccatacactgcacctagcctgtctaacccattaatcaagactcgagtgggaggcttgtcgtttaacaacagtacaccgctgcaagcgttgtttgaaaccgttagctgaaacagaaaccgtatgtttggactgtgcttttttagaacaaaagtttcaattgatgcatcagctgtactgtgattatcgttataccggcaaagtacgcgatacgatccaccaatacaaaatagcaggggatactgctttgtgcgaagtaattgcggatcgaattcagctgccgaaagaaaattacgacctcattataccgattccatctccgctgctcagagaccaaaatcgaaccttcaatcctgtgcagcaagtactggatgcaaaaggtatccgttatcaggctgtgttgcagacggacctcagaccgaaacaatccagcttgaataaggtgatgcgtgcaaaagcggagaatcctttttatatcaagaatgaaagcgcaatcaaaaatcttgagaacagttcaattttactcgtagatgatatttatacaacagggcttactgttcatcatgcgatagcaacgctatttgtcagaaaaattggaaaaatagatgtctttgctttcgctaggtagttgaaacatgttattataatagtgagcattaccaatcaaacatatatagctgtctcttatacacatctccgagcccacgagaccagagaggatctcgtatgccgtcttcctctccaacgagttgattatcttcattaactgttaaccctaatttagacgctacattctgcatggcttcattgaatttctcatctgtatattgagattgaagtaatttgaaacgatcatcaattgcaatcttagcgttttctaatgaattgtataatgtttgcagcaattcgcgatattttaaaaacagtgcttgtgtatcgacaagtttgccgattgtcgctgtttccggtgtcatactttcaagatttgtcttaattgcattatagacgttgattgtattatctaaattttgttgaacctgttgtgtcaatacagtatcgacaaggtattcactaccgataacttcatacacttcacttaacaacttgctgtgttggatattcaagttgataaatgcattgcttaattcactgaacagggctttctcacgtgttacgccacctatttgttctacatcagtgacggtttcttcgcgccattcaccattccaataacgacgcaatacagcgacttccggatccccagggactgcggggcctggtgggctgccgtccatggggtcacacagactcggacacgactgaaacgacttcgcagcagcagcagcagcagcagcagcagcagtgcatagatatcaaaagggtttagaacagtcaggtaggatcacacaagtcaccgtgaagcaatacttctccacttagccaaagctaacaaaagatttctgttctaggtcaacctagaagagatcacggaagaggtaaagaaacttaaaatccattagcaaaggcagttcaacctctcaagaaaccttgtgctaggcacaacactcttttctgggggtccacgttccctacaacctcctgatcccattctgtacccattcctttgcttctcccatcctgaaactgccacctggaagaaagaacgacgtcgttttccttcagaaaatgcgatttcatgccacataccttcttttaataccaagtcatacatttcccttcagcaaccaagaactgacttttatattggcattcgacagattggtgaacatacctatcagtgatagtagcgcctgtctcttatacacatctccgagcccacgagaccagagaggatctcgtatgccgtcttctgctttaaaaaaaaaaaaaaaacaaaaaagaacaacacacaaccacatagtattagacgcaagcaacgaatcactaaatgaggagaggtaccccttctgcttcctccagccgcttttgagttctgcggggctgtggatcagcagggtaccgttggctccctcggatgatgaagtattctcactcttggtgtccacctcaacagaagggcttctgaaaaacatcaaacaccacagaacaacgagtcactggtcagatatacgatgcggtttatgttaaatgtcaagattgacacaactttaaaaagaagcctcagtctcccaaacagggcttcacagctcaaatccaggaatcagcaagctatagaaagttactgagagaaatgaggtcactcgggcagttgatgtggacaggcgacaagttcaaggacaaagcccttgggcatgcggactcttagaggcagggaacagagaaaggaggggagctggtcatgaactgttaggaagaggagaaccaagaggccaaaggtagagaggatggcaggaaggcaaaaacagacaatagtaagaacccaataagttcagtccctccacctatccaccacttcgttacactttagatcaaattatcataaaaccttagtataccaatagtttgcccgtgctcgcggtgaggagcacgggtcttttttatgccaaaagtgaatttttttcgatatgtttacataaatggtggaggatagtggggagttgtggtaaattataaataaggtgaggtgagataaatgttcatgggtgagtacgaacaccagttagacgcaaaaggccgcatgattgtaccatctaaattcagatatgaattaaatgaacgttttatcattaccagaggccttgataaatgtttgttcggatacactatggaagaatggcagaatatcgaggagaaaatgaagtcattaccgatgacaaaacgtgacgcacgtaagtttatgcgtatgttcttctcaggtgctgttgaagtggaactcgacaaacaagggcgtatcaatatccctaaaaatttaagggagtacgctaacttaagtaaggaatgtacagtgatcggtgtttcaagccgtatcgaaatttgggacagagcaacattagaagaaccatcttaacaatatctctcaaacccagagacattctagaccctcaccttcccccaaaatttttttctagattcaataaatcaagtaatgttactcatgcagcagaaaaaccatcagtaagctttttattcagcctgcttttcctacttgattatgtaatttttaatgccgggatgccaataagccatgacttcaaacgcgccgtttgccacctcatcatcttcttcctcgatcttaaccagatcgccgtcctccgcatcaccaagattcagttccttatgtatttccttcaagatgccgccatatccaattaagcgccgagccgacagcgcatcgtccagatagtaaaccgtatccaaattgtctgcagtcaccttgttgccgcgcaaaatatctgtatccttgaccggatatttcgaaatctccagtacggccttttgctcctccattacctcacgaacttcactttcaatctgttccgcatcgatcttggcttttcctttgacccgctgtatatgtacccatcacactgtgtaactacgatagcttgattgttctcaccatatacttgttgtgcaaactgtagtcctaaatcatgcgctttatttctactgttcacaccacctttaggatctatctcatcagcaccaaacccttgaatgatagaatagccttgtacataacctttatcttttccatattctttttgtacttcacgcatgtgcattttagacatgaatgctgttttatttgttataggtacattaacacccgacgcccattgaacacgtttaccctctgtttgctcatggttgtaatgtgctttttcagacgttacataatcaatagacttttgtatgttgtatgtacgacttacttgtaaagtaggcataattttcccacctccttattaaaattattgacttgtttcgttaacgtctttctaaacgtattgaattctttaatttcttctatatcactacgtgtaagctctcgtttatttactaaggtattgaggtgtttaacatgttgattataattattagccattcctctcatatcattacgcaactcacttgctacacgatataaattctgtaataactcaaatgtctcgggatcaaatgtgttgcgaggcggtagaaatgttttatctttatctaaccactccattaacacagaccttgccacctcattaggtgatttaaaactcggtaacacttcacacatctgtgataattcatcataagcgttttgtgtcactcggaaattaatactcttaaccttacgctctgattcatctatcttatgttgtatcttcttacgttgtttcatcgcctcacgtagtgctttaactttgttgttttcctcatcatataaacgcattaattcatcgttggttaggttgttaatatttgtcatgatgtacctcctcaaagttcaaaatctcatttcaacacacgcccaaaaatgtgggctgtttaagtgttgaaatacataacacgtcgcaaaaaaggtgcgacaattgtgttatgttaaatgcattcaactgcagggcacataagcaaagcttagcaccccttgttgaatcataggcaagcagtcccaatgtaaacattgggtgcttgtaaaggggacgctccgctcccctttaatcccctcggtaaaaccctggtggtaaaatagtaactcatagttacattataccacgtatcacacaaaaggtgtgatacaacctaaccattgacgactgtattaataatcagtcaatgggttaggaaaatcgtcatcatcttcatcatctacagtcacattatcatgttgtgttgtagcttgatgatttgatgatgtatgtgaaacttcttttgaagtattcacataattagatgtaacttcagcggtcacatctaagtcgttgctatcaccaaataggtattctttgatagcattaagttcacttgcatcaatagaaccttctgcaaccatatcaagtaattttaatgatgcattttttgagtaatcaagttgcgctttatcaaattcattttgatgtttaacaagtttgcgtttttcttcctcgatgtgtttctttttattactaatcatatgacgaatacgttcagtatcattcacatattgttgttttaattcaatgactttttgattcatttaaatcactccgattcttaattatcttctaactcttttgcaattctctgtatcgttccgtaaccaacattgtatttaagacgtatagaattcatgctatgaccctcttttaaatcattaacgatcatgtaatacacttgtcttccgtgtctgtcttttgagtcagcactgtacttcttcggtttacctttgaaacgaccctctttctttgcaatttctataccgacgctttgacgttctctgatgtatgcacgctcattttctgcaacataaccaagcaaacttaacaacatatcagtcatcgctttatccataagttcattacctgtgttgatattaggtagtcctccgatttcaaaagataagccatcatcttttaattgtcgtatcactgtttgaacatcatcatatttacgtgaaatacgatctaatttataaacaacgagtacatcaccgccacgggatttttgcagtagctttttaaagccttttcgttcattaggtctgattgtaccagaaacacctttgtcgatgaatatgaggctttctgatacgccttgttgtttcaaatattcaatttgtgatgataagttttgctctttagttgagacacgtgcatatccaattttagacattgttttaaccctttcttatctgtgaactcaaaatgtgaatctaaatgctgtcataacaacgatgtttaattcacagtttaagtatactttatttgtgaattaattacaacaatttacacttatgaaataaaaataaacacttagggaaaagtctcaaaatcatattatagtattactataataaatattgagagtgtattttttaaaattattaacaaaggggacttgtaaaaaatgaagaaaattattacagcaagcttagttggtactttattagtaacaggaacttctacagtagttaatgcacaaacacaatcacaacaaggtaatgttcaaaaacaagaaactatcacaaatgacgttaaaaatgacaaaagatatcaagcactatcaccacaagcaaaagacagttttaaaacattagttgaagcgaataattataataatacagaacaaatggaactactgaatagtacagcgcaaacaaaaggtatggataaaaatggtaatactgaacgtggtaaaataggtattactaaaaaggttgttaaacaagcgtggaattctttaccaacaaaagttaaaaagaaaatcggtacacaaagtaaattctatgcagctcttaaagcagtcgatcacttcacaggtgatgttgaagatgaaatttataaacaaatgaaaggcttaggtttaagcgataactacgcatggattgctacaaaagcaattacattaattattttatagacagctggagatgatattttgcttccaagcacgttactatggattataacgatagcaacacttatatatataatatataacattgtgttttctaaaccgtttattaatgttttcgttgcaataataatacaatctgtattgttatttgctattcgttacttttggcaagataaaacatttggcgatgcgtttatacattcattcgatatcgtcactatagttattgtcatcatatttggtatttttaaattatcaaaataaagaacacagaaaggagctaacctttagggttagctcctttcttttaacctaaaaacgtaagtctaggactaacgcctagactgatttttaggtttttaaggttcttcaaattccaattcttctacatatacaaattgataatgtttatgaagtctattgaacacatctatagcagttaaatagtcaaaattatgtttatcacgtttagcaatgtttttccacatatccaaagcattaataccgtaaacttcatcaattaattttaaataatctttacgtttaagttcatctaaagaaaataaacttttgcgttgtaaaccaccatgtttcaacatgtaaattaggaattgtctaacttcatattttttaaaattatctttatagtctttcaactcattagaggttaaatgatgtaatttatcaactttcttaaatttagggaatccgtgttcaagcgcttttttataacctaagaaaccaatatcagatttaatattatgacccattttaataaaggcactgtgaacatcagcattatattcatattctgccatatcttcaaaaggtctagtaggaaagaaaccatagtcagatttaaattctttagttttaatactagaatactcacgttcctgtaacatacgttttttatcataatccatagataaaccttttttgatatcatcaatatgatcataatgctttgtaatagacttgagagaattatttttaacatcacgaaatgaaagcatatcagattgcatatcaataagtttaccgtcacgatttaaaacttcgttaagtaaaaacttacgtttctcaaaatcactaagatatttaaaagacttatcgcctttatatccagctttagcaaatacaccatcaaaagtcacagtttcattagtaaaaggattaatataagatttgtctttatcaagtgagatattaccacgtgtttttatattaaagaaatagtcatcttgaatatgtttaacctctaaaatagaacctttacccgttttatattctaaatcttcaccccaacaagctttaatgactttttgatacacagttgaaatacttgctaaataatcatcaatttcaagcattttttcccaaggaaaatcggaaataaatccgtcagtagtcacactgtgaacagtgtaaccgtgatctgctatatagttcattatcatacctaaaacacatctaacaagagatgttgttgtagaggcaatcacaccatcagtaattttactataaggaatcacctctgacacatctgtaagaatatttcttgctgtattaccatgtatgccttgccctgttttaccataggttgagttaactaatattttcattaattgagcttgtacagattttttaccatattttttagcaaaatcagcacgaatttgaatcatactacgaacaccaaaaccgacagggtgcataatgaaatcattatcaacatctaactcgttaaaatcttccaatgcatctacttcagaggcacgttttaaatcaaaaaacataaagccctgttttcctacggtaactgtagcacctacttgaatagcagcataaacatcgggcgcagatacaagtccataacctttacgtaaaaatacaggagaaccctttaaatttggtttgtcagattttaaagggattgtgggatatttaacagatttaggaaattcaaaatgtacatatccaaaaccagcttgacctatatgtaaccaatcgtcatgtgttaaaacatgcccctcattaaaaacaataggatctttatcaaaatcaatcattctcatcacttgcatttgcgcaggatatgcagaacgcaagtcatagtcataagtacgaccagtgataagaccatgtgaaaaactttcattacgaccaccaatataagcgtaatcaggcaaatcaccaaacataccacgagatttataaaacaaattataattaggtttaccatcttcaagtttaaaaccacgagcatgtttatcccacgaatattcattataatatttaagcatttcctttttaacattatcagttaaatgctttgcagcaatagcactaacagttacaccatcaccaataatatttttaacattttgataccactcatagctgatacgagcatcacggatagcataatcaacaaagaaatcaaaatgattttttcttaattctttcatattctctttatagaaattaagtggtttattatcttgtttatctaaaacattagtatccattttctctatgcctaaagattcacccaaactagctaaaggagaaccaggaggcgctaatttcatagtgtcacgcatatctaacttaaaaaaacatctttgacgtctaggaataacccaaaaattataaacacgaggattaacagtataaagacaatgtttgtcactagatatcatatttgtagcatgaacaggattttcatttattttattataacgtttctttaacttatctttatcatcatcagttaaagaacgaccttttttatctttaccatcttttaactgtagttttatagaagctaattgttgttcttgactacgactatgcttaagatactttaaaatttctttataatcattacacatagaaaaatcaacaccagcaaaatgagctataagtctaatattacaactttcataaaaaggagttttgtgatgtaaaagtttttcatttaaaataacaaaaccacgacccgcaaatgtattagatacaatatgataaatcatttcacctagagaaagacgacatttatcaacaacatgaaacacaaaatcatattgtatatcatctaaggtagtagaaaattgataacataaaatataacgatcatcatgataccattcagtatcaaaaccaaaatcaagataaactttattgcaatatctaagaacaaaatcacgtacatcaaccaaaccgctaggaacacgattcattaacccattattaccaatcacttttttagattctttatattttttaataaaatatttccaagtaccttcaacaactttactacaagatccattttcaccaacccataaaggagtaatatcattttttacataataatctattaaaccactaactctaaaaaataaagcaggatttaaaaaataattgggcggagtcaaaaagggggtcatccctggcaatcccccatgggtttggtaatgacccccatgcgaaacgcctgtcactatgccttttttgttgattttaaaactcacttgtctacctttgtatgtgagttttaaattcgttcttcttatgaaaatattcatgccgttgcttctataattttcttctgtaatcataaaaataagcacacctttctaaattatttagaggtgtgctaccaacaagacgatagtttattttttttaagcgtgatttataattgtgttttacgtacgtaaatggtattataaatatatcaatttaataaacaacagattcttgacgtctgttttttcatctttaacatttggtgtcttgttggtagcaagtcacctttatttatgtattatagcacttttgcgtatcaaacgcatcagtgctatttttaatttccaaatattctactaaaaaagccctttttcccctctgaaacagtgtgttttgtaactgtttcattactatgttgttcttctgtttcggtctgttctttcgtttctaactcatttaatcttttacctgtaatgaggtttaattgctgttgttgatctaataatttggtttgttccttaatcaacgcgtctttttcttcaatttgagctctgagaaacgcgttctcttgcattaactgttgtataagtggtgtatcgtacgtttcattgcgtgtatcgccactgtaacgctctttgttttgcaatactttttcggtaatttggcgctccatgttttcattgatgtagttcacaccgtcgataacttcaaattctaagtcatcgggtttgtttcttgtgatcgtcggttttgatacacctaatttatcagctagttgtttgattgttaacatatgattacctccattttgaagtgtaccatttgtgtaacagatacgctacacctgtcacaacacctatccaaaacagtggtgttataagatatgcaatataccacaacgctgttgtataccatttgtggctatgttctacctttgttgcgataaattgatatgcatgttctaaaaacggcatatctactaatgttgtgaatataagtaatacaactgcaaatgctacaaaaccaatcattgctgtaataaaccattttttatatttggttaagtcctccgtttcctttttaatgtcatcagcttgtcttttaaggtaccttgtagcgtctttgagtgtattctcatcttctttgattttgtcctctaattgggtctttaaatgtatttctaagctttttgaaacagcatctgctatttcatatatatcattacgctctaagtttactttgacttcgtgtgtctcattagctaaattctctaatttcttttttaatatatctatattctgttgtgtctctttactcaagtgtaaatccgtcgtctttgcttttagtagctctgcgagtttgttttgttcttgttgtatttgtttcgtgtcttgacttgttgtgttgatagtctgaatgctgtttttgatttcggttattgtttctaacaactgttgtgtcacgttctttttctctggcataatctttaacctcgctttctatgtcatttaatacttgcaaatcttcttcactgaattccaattcaagctcttcttcttcctcttcttcgtctttttgaagtaaattctgtatcatcatttgtgcttgtggtgtattcaattcttcttctatatctaaaccataatcaaccaaaccaggatctttctctttttccgcctgttgtaatgcaactttcttttcaatttctttggttaatggtgttaattggaattcttctccagctaatgttgatgctcttgatactttcgtattggttagaccttttttattagtgtattcataactgtagcgtaagttttcaccgtctttagctctagcctcaagcacatcgatgttatattcttcatgtagcaattgtttgaaatcatcaatgttttgaacagagggctcatctctagcaattctgatttgttcaattacttcatctttagctaagacaacaccatttttacgcatacgcttttcgattggtgtttgatattgtcctttagcttttgcgtcacgttttctatctttattcttttgccagttatctttgtctaatggtgtaagtccattctctaatgctatttcatcattaatctttgctagttgcgtccacttcgtcatatttcctctttgtgattttccatctaacccaaccgcattgctgatgatatggttgtgccacaatccacttttaccatcacactgtgtaactacgatagcttgattgttctcaccatatacttgttgtgcaaactgtagtcctaaatcatgcgctttatttctactgttcacaccacctttaggatctatctcatcagcacctttagaatattcacgcagtttatctgaatcactgacaacatccgggtcgctcagtaattcatttaattgctcataacgttcttctacgatatccaattgatcaaacattataattcctccttctcagattcactaggtgcaacgatatgatgtgcgcggcatctaggttcataactttcatctgcccctaccataataatcgggtcaccttctttagcaggtctgccattgattaaacgctgtgttctgcttgcaggtgccccgcaaactgcacatactgcttgcagcttagtaaccaactcactgacagccatcaactgcggcatcggttcaaaaggtttccctctgaagtccatgtccagtcctgccacaatgacacggtggccttgttctgccaaatcttgtgcaatttctacaaccgaatcctcaaaaaattgcacttcatctataccaatcacatcgacttcagtcaaatcttgttctaaaatttcttcagcctttttaatagtgattgcttctattgcattgccgttatgctttgatagcttcgcgagctggtcctaaatatttacgtggatcgtaaacatctttgtcgttgtttaatacttcgcgaactgctttcgctgaagaaatttggttttcagtgttcacgttgattttagctgtacctaaagaaatagatttttggatatctttagttgggataccagtaccgccgtgcaatactaatggtaagccagtagatttaccgatttcttccatttctttgaagcctaagtttggttcgcctttgtaaggaccgtgaactgaacctaatgctggtgctaaagtatcaataccagttttttcaactaattcttgacactctttagggtcagcatagataacaccgtcagcaacaacgtcatcttcttgtccgccgactgtacctaattcagcttctacagatactccgcgagcatgtgcatattcaacaacttttttagttgtttcaatgttttcttcgaatgggctgtgtgaagcgtcgatcataactgatatgaaaccagcgtcgattgcttctttacatttttcgaaacttgaaccatggtctaagtggattgctacaggtacagtgactgataggtgtaccgatttctacgatatcaacataatctttcactttgttagctaactctgccgcgtctactttatttaataaatcaattgctaattgtagttccaaaatgattcatcctttcataatgtgagtgttgtaacttttgctttacctaaattgtataccctgtttgataatgtacaaacaataggcaagtttacttatcaggtgctgccgcatcatctacataaacttctacattcgggtgatcatacaatacagttgccggtacatctggatcttgaataccgctcgcaagtttggtaattgcatctttctttttctctccgaatgctaataagatgatacgttttgcagacaagattgtagaaagtcccattgaaatcgcttgtttcggcacatcttcttcgttgtcgaagtagcggctgttagcttgaattgtactttctgttaaatctacgacacgtgtcacactgtcttttgctgttcctggttcattaaaaccgatatgtccgttttccccaatacccaagatttgaatatctacaggaccttgttctttaatgagttgttcgtagcgtgatgtttcagcttctaaatcttttgcatccccaatcggtaaatgtacattttcttctttgaaatgcggatagcgatcgaataaaacttcatgcatataatgatggtaactctcaggatgatctgctgataaaccaatatactcatctaagttgaatgtgtctacatttgaaacatctaattggttgcgctccagcaggttgacgaatttggaataaacatcaaccattgtaccgcctagaagacggcatacgagatcctctctggtctcgtgggctcggagatgtgtataagagacagtcccccaggaatacgcactcgaatcatgaatgcgtagaggggttctaatttttgtttgcgtcgttcttggcgcaagtcacggtcatcttgcatatagctgccgtggaattttaataattttgtatcatcatccgcaattgcacctgtaacagggtcattcaagccttcgacaattgtaccgcgcaaatagttgctttcgcctttattgcgttctaaatcatctaagcctttatataaatcattgtcattcttagccataatttgcctcctcaaaaattagtaaacgtcacgttgatagcgtttttcttttttcaattctgctaagtactcttccgattcttcttcagttaagccgccttctttttcatggacatggataattgcttgatgtacatctttagccatatgtttttcatcgccgcagacataaatcgctgcaccatttcttaaccactccagtcagaagagcctattgctatcacttatgatgaaacagggacagacgtgaattttggtgctttaacgaaaaaattaattagcaatttacaagagaaacatgtcgaagtgaattataagcatgaagtacaagacattaagaaacaggataatggtaattggaatgttgttattaaagatttaacatctggtcaaataacaaattatgaaacggaatttgtatttatcggtgctggtggcgctagtttacctttattacaaaaaacaggtattaaagaatctaaacacattggcggtttcccagtaagtggattattcttaagatgtaaaaatcctgatgttattaaacagcatcatgcaaaagggtatggtaaagcagaggtgggtgcacctccaatgtctgtacctcacttagatacacgttttgtgaacggcgaacgttctttattatttggacctttcgcaggtttctcacctacattcttaaaaactggctcatatttagatttaattaaatctgttaaaccaaataatatagtaacaatattaagtgcaggtgttaaagagtttaatttaactaaatatctcgtatctcaattaatgttatctaatgaagaacgtattgatgacttacgtgtgttcttccctgaagctaaagacgaggattgggaagtcattactgcaggacaacgtgttcaagcgattaaagatactgataaatctaaaggtaacctacagtttggtacggaagttattacttctgaagatggtacactagcagctcttctaggtgcttcaccaggtgcgtcaacagcagtagatattatgttttgtagcacttgaggttcacgtacgtgatcgcaggccgcgtggagcacccgttatctaacactaatattctaccgtatgtatacgccgcgttccctttatcctttcacctgccgagggaaacctgggctgcttcaaacaccggcaactctcatacacagtttattgttgttctgttagtcgctcagtcatgtctgactctttgccacccccatggactgtagcccaccaggctcctctgtccatgggattctccaggcaagaatactggggtggcttgccatttccttctccagagggtcttcccaactcagggatcgaacaagttctcttgcatctcctgcattgcaggtggattcttgactcaccaaaagccatggggaagcaggcactggggtggggaatttgcatttcaaacaagcttattttgtgcctgagtttgagagctgtaggtgctgggctgaatggagtctgagcctaagcctgagttctacacgctggggactcagctgtcattcgcagaaagagagagagagagagagagagtgtgtgagagagagagagaatgacagaggaatgcaaacttcctgataggtcttgaaaaccgacaggggcttaacggcccgcgggggttcgaatccctcttcctccgccattatcgtcaaatacaaagactaataaataatatagtaggcaaacgtttatttaatataaagtgtttgtcttttttgttgtttaaggccaatgatagaaaaatagacacgtgtttaacatagtttttattattgtttgtggcacatatcattaaatttattgctgtgattacgccaaacacaaaataatatatacttttattgaaaaaggacatcacgaagagattgaaaattaatgtctacgtgatgaccttttttaagaaactgagtgaaagcctttgcaaaacttgtctatacaagttataatctggataatattaatgtttaagggagtgaatcatcatggctgttaaaaagaaagatgttcaagatatagtcgaagctattgggggcagagaaaacttggacacagcaacacactgtgtgacgcgtttacgacttgttttgaaagatgatgataaggtcgataaagattatatacagtatcattatgtttaacattttctttagttccgaagtctttagaattctcatcattaacttttaatccactataaatgattggagaccaattaccacgttcttgggtatcataattccataatgtccatgacatgttatctttgatcattctgttagatatataattgtaatcatctttatttggctcgacatgttttccttgagacacactagttccattaaattcacccatataagtagggacattgtaatttttttcttcaataccgtttattttgttatcaaagcttttctttataccattatgactttgaccttgtttattgacagggtaattgtgatattcataaaccacattattttgattccattttttacctttttcaggatatttactaggattaggcatattttgtggatcccatgtagcttctataaatactatatgattatctccattgtttctaatagtttgaattgactcatcataaaatttagctatatctttatgagcaagaagtatctgagatttcaagaacacttaaagctattgcacgtgagttagaatgtcctgttattgcactgagtcagttatctcgtggtgtagaacagcgacaagataaacgtccgatgatgagtgatattcgtgaatccggttcgattgagcaagatgcggatatcgttgctttcttatatcgtgatgattactataatcgcgaagatggagaagaagatgacgacagcggaatggaacctgtaaccaatgatgataacggtgaaatcgaagtcattattgcgaagcagcgtaacggcccgaccggtactgtcaaacttcacttcatgaaacaatataataagtttacggatatagattatgcacatgcagatatgatgtaatttgcttttgcaacaccgtaattaaaggaaagaccaaacttgtgttttggtctttttttaatgggtatttggtatattgaagtgtgtgcgaaaaaatatttttacgtacaataaaatgatgtttatgtttaatgtacggttctaagtatgcgattagatggcgcattatgtgggactgagatggcgcacgtcatgcactgcacagtactgagtagctgatagttcgttgaactgttgacgagtgtgtgtggatcgtcgggtatcggactgttgcagtttatcgtgtggtgcttatgtctgaaaggtgcagctgatgcaatttatttcggttttttttttttttaatgatacggcgacgaccgagatctacagaaggagtaacgtcggcagcgtcagatgtgtataagagacagtggtaattgcagccatgaaattaaaagacgcttactccttggaaggaaagttatgaccaacctagatagcatattcaaaagcagagacattactttgccaacaaaggtccatctagtcaaggctatggtttttccagtggtcatgtatggatgtgagagttggactgtgaagaaagctgagtgccgaagaattgatgcttttgaactgtggtgttggagaagactcttgagagtcccttggactgcaaggagatccaaccagtccattctgaaggagatcagccctgggatttctttggaaggaatgatgctaaagctgaaactccagtactttggccacctcatgcgaagagttgactcattggaaaagactctgatgctgggagctgtctcttatacacatctgacgctgccgacgatactccttgtgtagttctcggtggtcgccgtaccattaaaaaaaaaacatcattcgttgtcgctgcgcccagtcacccactacacaacgcgtactacctagctaggtcacccataagcggcattcatcagcgataaaagctggattgcgtccgccttcaattacagccggattaattgtattcgcaccaacaggcatatcaggataacgtttcatcactgcccagtgctgttctaattcttttaaagcagtaataattttagccatcttttcaatcgcacttgcgccgtataaaccgccgccggcatgcaccatttgactgcgtgcgccatcatgaatggttgctttgctttgaacggtaatccagcctgtgaccacaccgccttgacctagtgcttggctgtcgctggtatccagtactatagctaaatctgctttcggactcatttcgcatgcatacttcgtacccgcttctccgacttcttcaccgaccactgattgcacgataatatcacctttaggcgagatgccttttgcttttaattgttccaacacataaaataacgaagccacgccgcctttcatatcactgacaccgcgcccatatacatctgtatagagcttctccatttttggctgcaaagaatataatcaatctgattttggtcctgagcatctggtgctgtctatgtgtagagtcgtctcttgtgttgttggaagagggtgtttgctatgaccagtgtgttctcttggcaaaaccgtattagcttttgccctgcttcattctatactccaaggccaaatctccctgttactccaggtgtttcttgacttcctacttttgcattccagttccctgtaatgaaaaggacatcttttcttttggtgttagttctagaagttcttgtaagtcttcatagaagtgttcaacttcagcttctatggcattactgattaggtcatagacttggattactgtgatatggaatggtttgccttggaaacaaatggagatcattctgccatttttgagattgcactcaagaactgcattttggactcttttgttgaccacgagggctgctccatttcttctaaggggttcttgcccacagtattagatgtaatggtcatttgaattcaattcacccattctggtccattttagttcattagctatgtataggaaagttagtggtagggttctcaatgataattgtctaatggatatggatgatttgaatgtatacgaggagtactctatgtatttattctttttatgttttttttttttttcaagcagaagacggcatacgagatcctctctggtctcgtgggctcggagatgtgtataagagacaggtaagggattatagctatttttcttgttgaaaggaatttttgacataaaaaaaccccagtagtatgattaaagcgtctactcaataaacaactactggaggtctctttatatgcaatataatactactagatgtatagacgaaaatcaagataacgaaacacttaaagatatgacgaaaagtgggaaacaacgcccatggagagaaaagaagatagataatgtaagttatgcagatatactggaaattttaaaaataaaaaaggcttttaatgtaaaacaatgtggtaacgtcttagaattcaagccgactgatgaaggttatttgaagttacataagacatggttctgtaagagtaataataaaacagttgcgataataatttcagtgatgtaaacatcccatccggcgatggtgtaaagtttaccatgctcgagtacgctcggcatcataaacttcaagagtaaactaaaggcggtagctttcaatgcgacaacacacatataaccaaatgttaaaaaccatgatgagaagaaactcacatacctcccaaagcttaaataactgaaggcgaatgagcctccggatactggtcagtgtttcacaagtgacccgtaacttacaccaataataatcattaataatgcaccaattgtaataccgattgctgctgaaatcggacctgattgtttaatccagtccccaggcaatataaaagaaccccagcctatacatgaaccataggcaattgcccagacgaacttttctgacaggttctgttgtaaatctcctcggtctacttttttatggtgttttctatctctttctcccataataaaaacttcacctcattcgatacattgggatgaaaaagcgctaaaactactaggtattagtagagatcaattaccagagcttgtaccaacaacccatatcttaactggcatgaagaaacgttttgccgagctcatggatattgatgaaaatactccagtagttgtgggagcaagtgatggtgtactttcgaatttaggtgttactagctataaaaaaggtgaagttgcagtgactatcggtacatccggtgccattagaacagttataaataaaccacgtacagattataaaggtcgtatattttgttatgttttagatgatgaacactacgtcattggtggtccagtgaataatggtggagtgattctacgatggttacgtgatgagattcttgcaagtgaagtagaaactgctaagcgtttaggtgttgatccctacgatgtgttaacgcaaattgctagtcgagtaaaaccaggtgcagaaggtcttatctttcatccatatcttgctggtgaacgtgccccactatggaattcagacgctagaggttcattctttggtttaacgctgatgacttttagtgtgtctagtcttacctctatgccttaacaatctaatacatccacggttaccgtgacttaatttaggcggatcaaataggcctaaataaatagcacggtaaatagtattataactaatagccaggtgaaacccttcacttttcaatcggtttgaaatttgttcaggtgaccactgttgattaagaaataaaaattttactttatcaaataaaatctttgattttaataataatttacgtccgcattttttcttattgcacttgtaattattatgagcatatgtagggctgtagcttccggaggaagcgtttctagctaattcacgagaaacagttgatgggcttctgcaaatatctttagcgatttttcttaaagaatatcctttagccttaagaaagaatattctttcgcgttcttctatggtaaggtgtttatatgagtccataatcatcatctccagtaaaattttgtcttcgcaaactttattttactagattgatgattttagggctcttttttatgtgttgcacttaaattgtaaattcatcagattaaaaagaaagtatttaagaccgattttagtcccgggtctgtctcttatacacattgttaagacagcagtaactgtaatgccttgcggtaattttcctgctctgtgcagtttgattaaaccggcaattgaagcattacttgcaggttcagcgaatactccttctttagaagctaataattggtaagcttctaaaatttcttcatctgtcacactatcgattaaaccgtctgattcttttaatgcagtcacagctttatcccagcttgcagggtttccgatacgaattgcagtcgcaacggtttcagggtttttgatgactttattttgaacaatcggtgatgccccttcaggttggaagccgaataatttaggcaagcctgtttgacgtttgtcgttgaattctttaaaacctttccaataagcagtaatgttgccggcatttccgactggaattgctaatacgtccggtgctttaccgcctaattgatcgactacttcgaatgcacctgttttttgaccttcaatacgatatggattgattgagttgactaactcgtgtaggtttgtcatagctttccttccaagcatctttcaatttcatggctgcagtcatcatcaacagtgattttggatctcaagaaaataaaacctgtcactgtttccactttaaacctttctatttgccatgaagtgatgggactggatgccacaatcttagttttttgaatgttgagtttcaagccagctttttctctctcaacatttgccctcttcaagaggccctttagttcctcttcactttctgccatcagagtggtatcatctacatacatgaaattgttgatatttctcctggcaatcttgattccagtttgtgattcatccagactggcattttgcatgaaatactttgcacataaattaaataaatagggagacaatataaaacctgaagtacttctttcccagttttgaacctgttctaactttccagttctaactgttgcttcctgacccacatacagatttctcaggagacaggtgaggtggtatagtaccgcgcgggactcgggaggcgctgacggcgtatgtgcgaaagcccagcgtgcgtgaagggggagccacgaatgccgtggcgatcgtgcactgatcaggtggctgctgatgcgatgatgaggtggcggatggggcactgatcacgtgtttatcaggcagtgatcggtgactgacaggcgctgatcatgggactgtgcacgcactgatcacgtggctatcatgcactgatcacgtgactgcgcatgcactgatgacgtggctgttcgggcactgatcacgtgtttatcaggcagtgatcagtgactgacaggcgctgatcaggggactgtgcacgcactgatcaggtggctgatcaggaactgaccacctgaccgcgcatgcagtgatcacgtggctggtcgttcactgatcacgtgtttatcatacggtgatcctgtgactgagaggcgctgatcacgtgactgtgccgtcagtgatcacgtggctgagcaggcactgatatcgtgactgagcacgcattgatcctgtgccgggagccggggaggcattccactctggacaaatgtcatgaggaaggaggctcggcatacgcaaatgcgggatcgagcctcaggagtccacccggatgttctcgagcatctcccccccaaaaaaaccggagtctgcctactgtattgctttgtgctctcacctctgatttcactgggggctgtcccccaccacgacctcgctctctctgtcaaagagttcacttacagctccaattcataaagttccttgtcattcttccctttaacttccaggtgagtctccatctggagcgcggaacccaccacgcttactaattatgcctgggctgctaagacccactcgagaaggtgtctagggtgaggcctgtctcttatacacatctccgagcccacgagaccagagacgatctagtatgccgtcttctgcttgaaaaaaaaaaaaaaagaacagaaaaaaacgataatgattgagacaaaactacaagatacatatcataaaacaaagacgaagatcatgaatattgtagagttacagatggaaaccgacactaatggagcaaagatcaaagcatgaagaaggaagtaacaagagatcgcatttgaatcttcaagtgcttctgtaggttctataggttcttgcatgatttcataaattcgatgactttccccaacagcatttttataatctgttattaatgttgatagattaatcaacggcatagacatttgaatgacatagaaaatcattgcgatcaatgtacctgcagtaatagcgcctgttgcgatttctaaagcaccgaaacctaggaagatagcgatagttagtcacatcgctacacccgaaataggttgtactactgctgaaattttagcttgttttaaacctaagcgataaatatcttttaaattagtatgtgcattatcaagttctaatctttctgtattagatactttaaccaatctcatttctgtcagtacacgcccaagtaatccactaaaattagcaatttctgtttgtgtactggttgagatcttttgcattacgcgacctaatggaatcatgataagtacaacaataggactggtaataaacgtcaataacgtcattttccaatccatgataaatagcataacgaggaccatcagcggttaacgcttccgcaagttcatccgcattttctcggctattacagaaaatcaggcaaagatatggattaacaatatcaatcaaagcttttgttttatctagttttgacgcaccttttgtcgggattaaatagaagtcgatgtttttcttgttttgtgttttactatcaacttcgattaattcaggctggttcaagtatttatttaagaaaggatgtaatgacttcggaatcgttgcactgaacactgcaatatgcgcactttcatccaagcgtgctgcaatatggtctacgtcctcaattaaacctaaatcaatcattaaatctgcttcatcaacatcgaggtaatgtgcaagatgtgcatgcaaagtgccatctttagataagtcattgattctagtcggtgtaccgataacgagttgcggttgaatattacagcgctgtttatctctttcgaaatctgtaccgccgataaataatgatactttcacatcatctttaaattgagcaagatgctgtgcagcattaaatagctgttgcgccaattctcttgtcggtgctactacaattgcttgcggctcttgcaccgttgaatcgatgccttccataagcggtaataggaatgcatgtgatttaccagtaccagtttgagactgaccgataatgttgttccctttcaaaattttaggtattactctttgttggatttcagttggctgattaaaattcaagtcttttacagcgtaaattaattgtgaactaagctcaaattggttaaacggatgttctacggccattaaaatccctccttttctttgatttatacataattaaacggatcagtgtttaaatgtgatgcttcgatattgtcaactttgccttctagccattgatccagcaatcattgctgtgttaaagacaatttcaccttttgttaaattgtcagatccaagctttctcccctcgtaaattgaaccgtcttcaaatacaagatatcgtttttctaacatggttgtttactcctccttgaatgccacttctccagctaccatagtgaatactgggttgccgtatactttataaccgatgaatggtgtgttgcttgcttttgaatggaaatcttctgctttgatttctctttcttcttctaaatcgattaatgttaagtctgctgttttgccttcttctaggatgccgtatggcaagtcaaagatttgtgaaggtttgattgttaagtagtcgactaattgctgtaatgaccagtcgccattttttacaaagtgtgtgtatagtaatgggaaagctgtttcgcttccgacaataccgaatggtacttttgtcattggttgtgctttttcttctgctgcatgcggagcatggtctgttgcgatacaatcaattgttccgtctaacaatccttcaatcagtgcatctcccgtttaataattcaacaacaaatactgcaattaacgccactaatatgatgccaaatggcgggaatacgaaacacccgactataacacctacaagtgccgtagactcacctaccttacttccgccaaaacgattaacaaaatatttattcatcatgaaatctgcgacaagaataaatacagtgaaaatgatcatagctacgtaaaatatccatgataaacgtccatcgttaaaacctatttgataaatgatagatcctatccacatgacaagcactgatggaataattggcttaattaaacctacaaatgctaagacaaacatgaggataataagtatccataaaactgctgtcatctatatctactccatatcttcttcggttattatttgatcttttgtaaagaaaataagtatcataccaactagaattgatgtcgctgatacaaaaaagacattttccaaaccaacccaatggctcataacaccacctaataaatttccacataatatatttatttggctcatatttgcgttttaaaatcgtatatagacttttaggtataaaactatatgatttacccctgaatctttaaaatgcccccttaaaattcaaataaaggcatataaaaataaaaagccaacccagataaaatggattggctttttatttgcttttgcgaagtagattataaaaaactacttttaataagcaccctaaatgtgatgtctatattataacaagaacacgcatttatgccgagaaaatttattgtgcgttgagaagaacccttaactaaacttgcagacgaatgtcggcatagcgtgagctattaagcctgtctcttatacacatctccgagcccacgagaccagagaggatctcgtatgccgtcttctgcttgaaaaaaaaaaacaaaagcaaccaacacaaacagtagttcgatggaacagacaacacacgcagcgtggaacagtctagcacgacactcgacaaaccgtgaatcaaccacatgtccactaactgtggtggttggtgtgtggacatgatgtgtatgatggcggtagtgtgagggtatgggagggagtgctgtggcgggtaggtatgagagttttttttttaaggatacggcgcccgccgagatctacacaaggagtatcgtcggcagcgtcagatgtgtataagagacagcaatcgacatccattggccatgctgcatggaatccactgcattcaatcgggattcattgggcctcgctgcctggaatccactgcattcaatcatgctgcatggaatccactgcattcaatcatgctgcataaaatcctgtctcttatacacatctccgagcccacgagaccagagaggatctcgtatgccgtcttctgcttgaaaaaaaaaaatataaatttatatctacagtaaagaaatttcagttttgactttcgtgtcagatttaccggtgctgattgctacctttcaatccgttctacgtccctgcctcttctacccatctcctgacgcactacactagtcatgatatcctctgccattctctcctttttgcgaagtagattataaaaaactacttttaataagcaccctaaatgtgatgtctatattataacaagaacacgcatttatgccgagaaaatttattgtgcgttgagaagaacccttaactaaacttggagacgaatgtcggcatagcgtgagctattaagccgaccattcgacaagttttgggattgttaagggttccgaggctcaacgtcaataaagcaattggaataaagtaacaaaaggagttgaagaaaatgagtgagaaaactaagaaaagcattcgtatagcattatcttttgcacaagtagtagtacagtcatttatagtttattatgcttacaagcaatataaattatctaaagaaaattaatttttgattatgtaataagttttggtactaaaaaagacttgatctgattagaccaagccttttgatagtgttatattaataaacaaataaaaagaagtcgctcacccaccgaccaaagtttgtgaacgacaatccaaaaagaaaacatgagttgttttttatgaatttgtatatttaaatactaaacgatatttaaatatacatcaagataaatattcgggtgggcgacttcttaaattaaattaaggagtcgattttttatgagtagaaaagagcaagaaattcattcaaagcaaagcacattacaagaagttacaaattacacctcaaccggatactctaatagccggttaggagtgcattctgtgcacccacaaaatcctaaattaagttttgacgctatgacaatagttggaaatctcagtcgtgacaacgctcaaaagctatcgtcatttatgagtatcgaaccacaaattcgactttgggatatactacaaacgaaatttaaagctaaagcactgcaggaaaaagtttatatcgaatacgacaaagtaaaagcagatacatgggatagacgtaatatgcgtgttgaatttaatccgaataaacttacgcatgaagaaatgctttggttaaaacaaaacattatcaactacatggaagatgacggttttacaagaatagatttagcttttgattttgaagatgatttaagtaattattatgcaatgactgataaagcagttaagaaaactgtattttatggtcgtgacgggaaaccagaaacaaaatattttggcgttcgtgatagtgatagatttattagaatttataacaaaaaacaagaacgtaaagataacgcagatgtcgaagttatgtctgatcacttatggcgtgtagaaattgaacttaaaagagatatggtggattactggaatgattgttttaatgatttacatatcttgaaaccagattggacttcgccagaaaaattaaatgaacaagcaatggtttacatgttaattcatgaagaagacaaatggggagaattgaataaaagaactaaatataaatataaaaatttaattaaagaaatatctccagttgatttaacggaattaatgaaatcgactttaagagaaaatgaaaaacaattacaaaagcaaatagaattttggcagacaaaaggtaagaagctattttaaaaatggctaccatttgactcccttttagctcccaaatggctccataaaaagggagctatttgggagctatttttgattttatgtagccatttgggagtcatttttgattttgggtagctattcggtagcttttgtgtagtcgttcgggagtcatataacaatttttatcgcataaataggaatcccatttgacactgtcaaatcaatattttgcacagaaacggctaccgaatggctacatacggagacatttctgtgtaggattcctcttatgctcttttaaaatattttaaaatataaaagttacattatacacctatttttttcaggttttagctttttattgagaaggataattaaaataaaaaaacatatttttttctgaaagtgttgagaaataaattttaaaatgatttatagcctctctgttgaacaaaaaaagtttttagtcatttttatacgtggaatgattaaatgtcctagaaagggcttaaaatgcaaaataaaaagactactcattttttgagtagtctatctgtaggatagtttttgatattctaaatgaaaaggagtaatacataaatcattttgtatacatgggataatacaaggtttaatgcatgggataaaaaaggatatgatttcacttttaaaaagggtatttgaataatagaattgtattgtagacattgattatttaggaggaatagaaaatgagcgaagaaaaattcgaacaagcaaaaggaaatatcaaagagactattggagatgctactgataataaggatttaaaagcagaaggtaaaggagataaagcttctggtaaagccaaagaagtagtagatgatgttaaagataaagctaatgacttgattgataaagttaaaggagataaaaactaaataaaaattaaaacgtcttaagtattattatgtagcatacttgggacgttttttactgtctcttatacacatctgacgctgccgacgatactccttgtgtagatctctgtggtctccgtatcattaaaaaaaaaaatacacggtagatttcttctctccattcaagcagtgcgacctctcccaccgccacatccgattaggtacggtgttcagtagtgtgcaaggtcgtcttgcctgcctcaacacttaatgcaatgatatccttttgattcaatacataaatacgttcatccacttcaatcggcaagacacttggtgctttgtttgtctgtatttctgggggattgtcttgctgctgcagtgtctctgtttgttctgttgatttgggttggatttgtgctgcgacacgtgctactgccgcatcgattcttgcttgttcgaatggtttgagaatatagtcagtcgcattgagttcaaaggctctgaccgcaaagttgtcatgcgctgtcgcaaagatgatgtgcggcggctgctgcatctttttgagtttttcagctaaatccagtccgctttcattcatcagattaatatctaagaagatgacatcataagtatcataaagcattttttccagtgtttctgatatagtttctgcttcttctattttttcaaactgcccattttgtgtgagcagatagttgagttcattacgcgctaaaggttcgtcatcgacgatgaggcgttaagcaactcaaattaatttttagtaaattatttgttaattctcatgtattttacatctgaatttaggtattttacgctatcaaaaagagcctggtttaacccagactcctttgatatcaaccttattccataacatcacttttctcggctttttctgctacttttctcatcacaggattaatcatcggtttaaagataataccgattaacaagaagccgataccgaataaggataagaatataattttcttcgttaagatttcaggtacataacctccgaccgcttctctcatcgcagcaatcgcatacgagaatggcataaatggatgtatcttttggaagaactccggcgtgacttcaatcgggaatgtacctccgccgcctgcaatctgcaagactaacataataatcgcaatggctttccctgggttgccgagtaatgacaccaaggtatacacaattgacacgaacacgagtgaagaaaggactgaaagtccgataaaccatccgacgtgttccacttgtgctttcaagataaccaagtctccgatagacacaatcaggtattggataataccgattgggtagaacagtcccatcttgccaatatatgtttctctcgttgtgagttgctgcgtcatggcagtgtgcttgttatctgtcgtaagcaagctcaccatcagcctgttggttgacaactcacagctgcccctgtgaatgactgactgaaatgagaggtgggtgggggaagaagggcacaaaagattggctccttggcagtaaggagccctaactctgtggcacaattgtgtacagttccctgagatctgaatagagctagtctccacctgaggccacgttcttgcttagctttaccttttttccctgccctgtcctgctttcatcacttccctaataaatccctcaaaaaattctcgtctcaaaaaaaaaaaaaaaaatctcaactcaggctctgcttctgggcaatctgacccatgacacccttggttagcttcatgagggactattttgctcatccccctggaacatattcttgtcgtaggttctgcatatgaccttctccccatctgagaataatgagggaatatctttgtcccaccctaagaacagcgcctggaacacagtaggccctcaataattgtgtgctgaatgaatacaggggcgtgcacaggtactgtcgcgacacgcgaagcaggctagcagtaacaagaggactgcggtgaagcagcattaagtgagagggttgcagcatgagcaagcgcatctgactgaacatcagtaagggcatctgactcagcgtcagtaagtgcagctgattcaacatcagtaagtgcgagcgacacagcatcaacaagcgcatctgactcaacatcagtaagtgcatctgactcagcatcagtaagcgcatcagatagtgcgtcactaagcacaagcgtgtctgattcaaactcaatgagcgcatctgactcagcgtcagtaagcgcatctgactcagcatcagtacgcgcatctgactcagcgtcagtaagtgcatctgactcaacatcagtaagtgcacgcgactcagcgtcagtaagtgcatctgattcaacatcagtaagtgcgagcgactcagcatcaataagcgcatctgactcaacaacagcaagtgctggcgcctcagcaccagtaatactaaacgccatgtaccgcaagcttcaacaggaggttggaaatcattcgtgatttcatccattctgtggagcaggttgccggtactatcatgatctgcagttaaatattcgataattgcttctacattgtctacagcttcgccattcgcaaaagcaatcaattgatgaaagtcttgttcgtcttctttttgtgtatgttctaacatattattcttgaatgttgtatataggtctttcaattctaagagatagtcgtgttgagggccgtgtactttcgctaatttcgttacgtaaggcgttaagtttttgaattcctctttcataggtgtatgatatgcatcttgaatgtattgaattaatgaagggatactaagatatttaggatttaaaccttgtccgcctgcatcttgtttgcacgctgcttctatttcggctaatagatcttctaatacgacgcgctttttatctttagcggctgcatcaatcgtaacttgcccgccgcagcaaaaatctatagcggaatgtttaaatacatccgcagttttaggacacgtacagtgtatcccgctgttttacctttttcaatttttaaaggtatgctaatcgttttatccttagaaattttataagtttgtgatgctgaatttccagtgttgtctttatctctgataaagacttctactgtttgactcttacctttacttcctgagtaaggcaccttaactgtttcagttgtagttttcacatcactatcgtcggtgtcgtcatcgccctcaccagacttgccttttgaaacggttaaattaatgacagagccttcatctactgatttattttttggtgattgagaaataatattcccttttttaactttgtcatcattttcttgagtggcttgtactctaaatcctttagattccagctcttttttagctgatgaataagatttattttcaaaatcactcacataaacttgacgtacacctagtgactcgtagatttttatatgatgatcatttagagcgacttcactatttgcttctacactttgttcggaaattaaacctttgtctactgagcgactatagggtatgaaagaggtaacagagtaacgaactaaaggagtcgattaaaccatgcacgaacaacaatttttcgaattagaaggcaaacaaatgactttaagagaagtcggcaaagcaattgaaaaaattacggggtatgaacatacatcactttctgcacaagttaaacgcagagttgcgcaaaaaccaaacttcgagtcggatacagatacttttgaagctacatgtcagttgagccacttaggcgactttgtagacgttgtatttactgcgcctaaaagcgagaaagaacgtctgcaagaagttccggtcacggtacaactgatcagttacaacacacgctctgaatatcctcaagcttaatttgagggcaatctactgcagcttttgcagttaacaatcaaatagatagtgtgaagggcactcgtaagtgaagtgcagtgataacaaccatgtataagaacgagagtacaatctactttgctacagtgcttttttgtatatcattttttacgcgatcacaaggactaggtattcttcatagcttattattcctgtcctactgaaatggtaaacagtggtcatggaattgtctcccataaccatttttacagatcaactcagcatctggattttctgagacttctgtttctttttatacttcaaaatattcccattttgccacatgtggcactccagtgtttgcccacttctaatcaaatgccttccctgtggtctttacctgaaagaaaagcccgatgcgagtcagaaacttggccagtttgtgcctcaggtacccgctttccacttattcagcatgcatcatgcaagccacagacggcttgcactttggtggtctctattaccttgcagggggcattccaggtggcactagtgataaaaaaatccacatgccaacacgggagatgggggttcaatccttgggctgggaagattgcttagagtaggaaatggcaacatgctccggtactcttgcctggaaaattctgttgactgaagatcctggtgggctatagtctaagggattgcaaacagtcggacatgactaagcgactgagcacacacagacacatggcaatttgattaatacaagtgacgaagataaaacaacagacgaagaagaaaaagcacattcaattacggcaatttggaattttgaaaaacaaaattattatttaaaagatttgaaacgttagctaaaaagctagcgtttttttatgtctttttgcccctgcgggaactatagcgttcaaccggcatggttgaccagttttcatgttaacttttaagtttgcatgtaaatgggcagtgcacagtgcagtgtttatttttttctgcccagtttgctaaatttttaatttgcatataacctgtctcttatacacatctgacgctgccgacgatactccttgtgtagatctcggtggtcgccgtatcattaaaaaaaaaagattataacaaacgccagctctgcagccctacccctctccatccaactcaccccaccccctacagtattactcaatgtcacatatacacagctaccccaccctccgctgacactactgacttgtagtcatacgagacacgccatcattacttatcgtcttccgggatcatgcgtgtgatactgattttttttttttaatgatacggcgaccaccgagatctacacaaggagtatcgtcggcagcgtcagatgtgtataagagacagtaataaaacatgcatatgttgattataactaccatcatttttattaactgttacttccgttgaacgcaaaaacccaacaagattttgcttcacttttttatatctacttaacctatcaaatgctttcgttaaatgtttcaaactttgttctaaagtatccccatctatcgcatttttcgttgaaagtgttaaaaataaccaacgcgcttttggtttttctttaacaacttcttcaatcactttttgagcttgataactatttttcatagcacgcctccaatgacaaagaacttcaaagaaccttctacaaaaccatgtcttatgtaacttcaaagaaccttcatcagtcggcttgaactctaagacgtcaccccattgttttacattaaaagcggtctagcaggagagtcagcggaactggctgcggccgccagccccgacagatcgacggcatcgagacgatgaatcgagtcagaagacatgtcatccattcaaccagatgcaccgaacgagtctcgccgagatggctgacgatcatgaccgggaaccacgttaacgaggttgttcccggcagtcatctgttgtggcgcaccagtcggtgagagaatggccgcatggctcatgaacgtgctgggaaacctgcccaggaatccgacctcatcgatgtcgatgccgtgttatcggcctaccacgacatctcccccgatccttcgaaccctgatcagatggtcgtcttcggcacgtcgggtcaccgcggctcctctctcgacggcgctttcaatgacgctcacatcgccgctaccacccaggcaatcgtggaataccgcacttgtcagggaatcgacggcccgctcttcattggcaaggacacccatgctttatccatgccagcatggacgaccgccattgaggtaccttcaatgcaaacatcagaaagaagttcctgagaatgcttctctctagattttatacgtaatcccgcttccaacgaaatcctcagagccatccgaatatccactttctgattccacaaaaagagtgttttaaaacggctctgtaaaaacaaaagttcaactctgttagttgaatacacacatcacaaacaagtttcagagaatgcttctgtctagtttttatgggaagatatttcctttttcaccataggcctcaaagcgctcgaaatgtccgcttccagatagtgcagaaagagtgtttcaaacgtgctctataaaagggaatatgcaactctgtgacttgaatggaaacatcacaaagcagtttctgagaatgcttccctctagattttatatggagatattcccttttccaacgaaatcttcaaatctatctaaatatcaacttgcagattctactcaaggaatgtttccaaaatgctgtatccaggcaatggttcaactctgttaattgatggctcatcacgcactgatccggtggctgatcacacacgtatcacgtgactgatcatgtacagatcacgtgaataatcatgaagtgatcacgtggctatcctgcactgatcacgtggatatcatgcactgatcatgtggctgatcacacacgtatcaagtgactgatcatgaactgatcgattggctatcatgcactgaccacttatctatcatgcactgatcacgtgactgatcatgcactgatcacgtagctaccatgcactggtcacgtgactgatcatgcactgatcaggtaattgatcatgcactgatcacgtgactgatcatgcacagatcacgtgactgatcatgcactgatcacataattgatcctgcactgatcacatggctcatcacgcactgatccggtggctgatcacacacgtatcacgtgactgatcatgtacagatcacgtgaataatcatgaagtgatcacgtggctatcctgcactgatcacgtggatatcatgccattaaatgaccgaattgcatcagctcgatttgttacgaaaacaaacacgaccacaaccgatgcgttcaagtcacttgagcaaggatacatcggagaagttactggtgaagtggtgtccttttataacgaaccgacaagaaaacatacgactgaaagtgaatttgatgtatcaaagataaaagaattaccgcaagtcgatattttatacggctatcaaaatgatcaaaaatatatgtattatgcagcagtaaaaacacgtgcgaaagagattgtcgtcgctgcagtaggaaatggaacgatgtcaacagaagccatcaaaggggctacagatgcagtgaaaaaagatgtggttcttgtgagatcaagccgtacgggtaatggaattgtcacccatgaaaaaacggatgatgaacatcactttgtgtcgtctgattcattaaacccgcaaaaagcacgtattctgctcatgctggcactatcgaagacaaatgatccagataaagtgcaaaggtattagagctgtatcaatgattaatgcatcgacacccgcttcaacaagtttttgagcgcggatttcagtatctttagacgtaccgatagcagctgctgctaataatctaccgtattcatccttagaagcatgtgggaattcaagtactttttcaatatctttaattgtaattaaacctttcaatttaccattttctactaaaggtagcttttcaattttgtgttcttgtaaaactgcttctgcttcatctaaagttgtacctactggagctgtgattaaaccttctttcgtcatcacatctgaaattttaattgagaaatcttcaataaaacgtagatcacggttagtaatgatgcctactaaatttccgtcagagtcgttatcaacaattggaacacctgaaatgcgatatttacccattaaagcttctgcttcgtaaacactttcatcaggagttaggaagaaaggattagagatgacaccattttcagaacgttttactttttgtacttcatcagctaacaagaacaacgagcacaagaggacgaagcaactgagtgagaggccaaaaaacaacctaaaacggaagagaaggtaggacaggatagtagaacagaaagaccacgagaagaagaggcagaaaatgaagctagcacgaaacaacaacctacagcagaagaagaagcaacaaaagaaagtacaacagaacaaccttcaacagaagaaaaggcaagagaagaaagcacaacagaacaaccttcaacagaagagaaggcaagtaaagaaagtacaacagaacaaccttcaacagaagagaaggcaagaaaagaaagaacaacagaacaaccttcaacagaagaaaaagcaaaaaatgaaaaaacaacagaaaaaccttcagcagaagaaaaggcaagaaaagaaggtacaacagaaaaacaatcagcagaagaagctgcagcaaatgacattacaacagcatcaactaaagaaaaatcggagactactgataaaattacaaccacagcagaagctagaaacacaaacactctctaatccttctgacaaacaaacagaagactatatctcaggacgtttcggttaatgactgttattcgtcagcattacgaagagcagttaaaagacttaatccaagatttgcaaaatcttggtattaaagtctactacagtatcgacagtgcagtgcaatcattaaacaaagatgatcgcaatttcgcacgtcaaatcattaaacgtgacttagatattaaccaattagaagatgaaattaacgaaaaagtaattatgctgattacgaaacaacaacctattgcaacagatttaagaatgatgattgcagcacttaaaattgcatcagaattcgagcgaatcggagataatgcagcaagcattgcgagaatccgcaaacgtgttaaaatcactgaccattacattttgacacgtctgaaaacaatgggtgacttagctttactcatgttaaaagatttaaacacagcatttaaaaataaggatgttacactcatcctagaaatcattgaaagagataaagatattgacgacctttataaagatatcgtcaatacgacttatctgattgataatgatccattcgttgctggtcaagcacatttagcagcaagacacttagaacgcatgggagatcatatcgcaaatatcgctgaaaatatttattactatattacccatctgcagtgattttggagcccaaaaaaataaagtctgacactgtttccactgtttccccatctatttgccatgaagtgatgggaccagatgccatgatcttcgttttctgaatgttgagctttaagccaactttttcactctcctctttcactttcatcaagaggctttttagttcctcttcactttctgccataagggtggtgtcatctgcatatctgaggttattgatatttctcccggcaatcttgattccagcttgtgcttcttccagcccagcatttctcatgatgtactctgcatataagttaaataagcagggtgacaatatacagccttgacgtactccttttcctatttggaaccagtctgttgttccatgtccagttctaactgttgcttcctgacctgcatacaggtttctcaagaggcaggtcaggtggtctggtattcccatctctttcagaattttgcagtttattgttctatagactttttaaagggtgtatatccaaaattcttatgcatggtatatagattgaacacaaaaaataccagcaatgcactttaatcaatacattgctggttaaactaattatatacgcacttttcgatttgacgtgagaagcatcacttcttggtcaatgttcttgatcaatgcttgctgttgacgatggttattatccattttgttacgtaaatgttttatggcgtcagtggtttcagctgcttgttgattgacttctgacaataagacttgtgtgccttgaagcgtttgattgatttgttgctgatttcgcatagaattttgatagtaacgcacggagtcttggtagaaacgattgagcgtatcatgcaaagaggctaagtaactgctgatttctctatggtgtgattcatttcttgcttctttaatggcctctttccagttttccgcatacccttcacttaaatgtgccactaactcagctaataattcctgtcgcttatagacatctccgagcccacgagaccagagaggatctcgtatgccgtcttctgttttctgcctaagtcataaagtgtttgtgccattgtttttacaaaatctgggttgtatacaccaacaacttgataatctaatttgaatggatgaatcattggtcctaaaatattgaagattgtcggaccttccagcatttttcggataggttgaatatgtttcatcactggataagtatcagtcgcatttaaaaaagctaaacctatttcatccattttcgcttcagcatctataacttgtgtgcctgcgatacccattttgttgagtaaatcggtgctgccggaagcggatgtaatgcttcggttaccatgttttaataccttaacgcctgctgaggcaaccacaaatgcggttgttgtagaaatgttgaaactattagatttatcaccgcctgttccacatacacacatcgcaccaggataaaccggttgaatgggatacatcgtttgtatcatcgcttgaactaaataagtcacttcagtttgattcaaggggcgggcagtatattcacgcagtaattcaaaatcgcggtggttatttttaacactttcaacgaaaaatgcgatcgatggggatactttagaacagagtttgaaacatttaacgaaagcatttgataggttaagtagatataaaaaagtgaagcaaaatcttgttgggtttttgcgtgcaacggaagtaacagttcataaaaatgatggtagttataatcaacatatgcatgttttattatgtgttgaaaatagttattttaagaataaagctaattatacaactcaagaagaatgggttaatttatggcaaaaagcattacaagtaaattatcgacccgtagcacatattaaagcgatcaaaccaaatcaaacaggcgataaagatattcaagcagctatcaaagaaacctctaaatattcggttaagtcatctgattttttaactgctgatgatgaaagaaatcaagaaatcgtgaatgatttagaaaaagatttatatcgaaaacgtatgttgagttatggtggtttgctcaaacaaaaaaataagattttaaatttagatgatgccgaagatggcaatttgattaatacaagagttagttgtgctgtactgaggtctatctcatacggacaatgagaacacgtggatttagtggaggtacttgagttgtgtccgtcctgcgtggggtatttgtcagccaggtatagtgtaacttggatgacgtgcatctgactgtccttttgtagttttattttttttttttcaagcagaagacggcatacgagatcctctctggtctcgtgggctcggagatgtgtataagagacagcgcctgggcgaatacataatgtattagatccatcgttccactgttctctagcaccgtctatgacatctccattgccagtaggtatcaattctacgttatctacacctaatgcattggctaacgtttctcgtagctgtctagagctgtctcttatacacatctgacgctgccgacgatactccttgtgtagatctcggtggtcgccgtatcattacaaactacattttactacgttgcgctatctgatatatattttttctcattaatgtttttatgtatctgctcgtgagtgaatcttccaaaggatgtacaatcaccacttcgaaatcatcaatattatagccgagtgctttcgcataatcttttaattgctgtttatgatgttttaaaacttcattcagcataaagtcttgatcgtgcgatgcactggttgtcactgcatctgccttcttcaggagcataacttttaatggaatgatttattcgaattcaggcgcatatctctgcacctcttcattcgtcaaaggcaatttggttttcgataatggatgtgtcggatgcccttcagcgactaaactttcagagtaaagcaaatcatccatttcacccaccgcagtcatatgcgacatccacgtaaagtagttcaaacttacaggcattcttgagaatttcatgctgtcttgaatcaagtttctgcgctgctccatttgcgcataggttaaatcaaaacctcttctgctgtgaatcaattcttgtttcaagcgttcaggaaaaggtgtatcgaaatgtgtttctaatatttctactaaagcttctaaggaagcaatcggtgttgtttgattaccgacttgatattgaatttgacccgccattttataaagcgtgggtaaaccatttattattaaatggtctgaacagtttatcaggaactaacattatgttattaggtttagttatcggtgcaatgatggccattgatatgggcggtccattcaacaaggcagcatatgtattcgcaacagcagcacttactgaaggcaacgcagcaccaatcacagcagcgatggtcggcggtatggtacctccgattgcattagctttagcaatgcttatctttaaacgcaagtttactaagacgcaacgcggttctatcgtaccaaacttcgtaatgggtgcatcatttattactgaaggtgcgattccatttgcagcggcagatccgttgcgtgtaattccatctatgatgatcggttcaggtatcggcggtgcgattgcacttggtttaggttcatctattcaagcaccgcacggaggaatctttgtcatctttggtacagacttctctcattcattgcaaaccattttagcgattattaacggtgctttagtttcagcatgtatctacggtttccttaaacgcaaaccgacagctgatgaaattgctgcttcagaaggatttggtatgccggatattaatgcggtctctactgagacatctccagcttatacatttaatgaagaacatgtttcaggcgcaacatatgcggattatttacaaacggtcgcacagcactacgaattgcctgtacaagaaaatacagcagtagagaaaatcgactttgtggatggacattatgaaatcaatacagaccaaggattgattatgagcgagtatgtctttatcgcaacaggggacttctcatttgcgcgcaagcctttcaaatatggtcaacactacagcgacgtagaagactttactcaaatgccgggtgatgaatatgtcattatcggcggtaacgaaagtgcgtttgatgctgcaatctgtatggcagaacaaggtaaacaagttaaaatctatacgcactcaacaggtttagatgataaacatgcagatcctagtatccgattatctccttatacgccgcagcgtctgcgcaaaatcgttgaaaacggcgcagaaatcgaattgaatgtcggctacacagcttctaaagtcacttactctgatatggataaaaagtatgtcgtgcaattcaacaacggcaaacaagcaacatctaaaaacgaaccgattcttgcgactggatttgatgcgacgatgaatcctctagtccaacagctcttcagtacacatgatggtgaaatcgaacttacagaagatgatgaatctacacgttacccgaatgtgttcatgattggacatacctatctatagaacgcattgttgttgaactaaagaaactcattaagggtatcaatgttgctcaaagttttaatcaaatgaaggagatagatgcctttaagcacattccattctttaattcatttaatatgcaacgcgttcatatcgatgaaccattagaatttgaaatgtggattgctatcatgctagctcagcaaccgatgactgatacacttaaattactaaagataagcaataacgaaaaatctaatattcacaccttagcgaatttaattaaaacattaccacatgtacaatctaagcaggatttaattattgtgatttatgataatgacataaaaaatattaaaaatgtattagctactaaggaaacaatcaagaaaaacaatcttaacacacctaatcctttaatcttaaatgaacgttctattgaagaagtttataaccagctacctatccatcatcgaaaggaaatggctatcaatggtagtgatattatccaacaccttaatacgaaatcaggaccgtggttaaaagatgtgttaagacaaatagaagtggtacattcggatacctcaaccaaatcagattgaacaacccagaccatcacttatatttattttcagcaaatgatacatcattaatatttgaagaaactgatatgccgagtgcattaaaagagcctttaacttatgaggtattatgaagagttaaagagcttgaaaatgaatgtttctatgcagttgtctttgtacctactgctgaaaatcatgcatatcagttagaaaaacgcttagcgtcattatctttagactttgaaaagttccctggattcaaatgttatcgtttattgaaaccagacaaaggcacaacttataaaatttacttcggctttaatgaacgccgtaattttgaagatttcaaagcttcttcagtttatcaagaaaacttttcaaaagctgcactatctcaattcttcggatctagcggacaacattcaagttactttgaacgttacctctaccccgtggataaagactaagccaaaagcgatagtattaaaagaacgccgattaactaaaaagttaatcaggcgttcttttttgctgttaatctctcagaaatgcttcttgatattttaatttcttcacaatatttctgatagttaagaatccgacaataaagaacaataatgcgaaataaaattgtgccgggaataaaatgacatatgcgatagttaaaataatcgctactgcaaacataatatgataaaggaattgagcatatccttgaatcactcgttcttcaggaaccggccaaacttgcggccaaagcccatatgcttgctgcgtataaaattgtgccgtctgcaaaataatgatgtacatgaaccgggtacatgtacatgtgtgtgttagatcatctatagtgtggtatgtatgttgtagttctcgtcataggtagacgaatgatgtattgtatgttttttttttaaatgatacggcgaccaccgagatctacacaaggagtatcgtcggcagcgtcagatgtgtataagagacaggtatatagacttttaggtataaaactatatgatttacccctgaatctttaaaatgcccccttaaaattcaaataaaggcatataaaaataaaaagccaacccagataaaatggattggctttttatttgcttttgcgaagtagattataaaaaactacttttaataagcaccctaaatgtgatgtctatattataacaagaacacgcatttatgccgagaaaatttattgtgcgttgagaagaacccttaactaaacttgcagacgaatgtcggcatagcgtgagctattaagccgaccattcgacaagttttgggattgttaagggttccgaggctcaacgtcaataaagcaattggaataaagcaattaatgcgatgttccgaaaatgtttaacgaaactacgccgactatgattaaaactatagatactatgtatatatgagacgtgagattcaccattaagtttcatttgcatcacttgatcatccattaaagaaattaacggtgatatgactaacgttggtttctcaattaaatatgtaggaagttggtaacataaacttttcccgcttcctgtaggtaaaatacctaaggtgtgtttacctgctaatatgctttcaataatctccttttggccacgtttgaaagtctcaaatccaaaccattctttaagtttatcttctaacacgtaagtcacctcgctcaatacctacgatgattaattttatttgaaaataagttaagtcttcaaatgcttgtttgtattctcttaatcttaggcctatgtgatgatcataatattgaataaattgatcaatttgtttttgattgacataagtgttgtaatcattctgataacctttaataaatatttccaatatatgatcttcaatagtatttattttaacgttttgatgttctgctatttcgttcatattccgaacgcactaatgcagaagtatacttcgctaaagctgatgtagttgaagaaggtgctactaatgctaacactgatcaacctgctacttctgaagatttcttccctaaagctgatgtagttgaagaaggtgctactaatgttaacactgctcaacctgctacttctgaagatttcttccctaaagctaatgtagttgaagaaggtgctgactatgtagatacttctaaagaagctacttctgaagatttcttccctacagctgacgtagttgaagaaggtgctgactatgtagatacttctaaaccagctacttctgcagatttcttccctacagctgatgtagtagaagaagaagctgcctatgtagattttactgaaccagctactattggtgacttctccaatgataaagatgtacaagaagcatgaggtaaaaatatagtcaattgtgcagatactattgaaacagttataactaacaataccttcagtcaacatgatatgcacggtcatccagataacaagtgagagatagatgtggcagtaggttggtgtggatttttttttttaatgatacggcgaccaccgagatctacacaaggagtatcgtcggcagcgtcagatgtgtataagagacaggcgttcaacggaagtaacagttaataaaaatgatggtagttataatcaacatatgcatgttttattatgtgttgaaaatagttattttaagaataaagctaattatataactcaagaagaatgggttaatttatggcaaaaagcattacaagtaaattatcgacccgtagcaaatattaaagcgatcaaaccaaatcaaaaaggcgataaagatattcaagcagctatcaaagaactgtctcttatacacatctgacgctgccgacgatactccttgtgtagatctcggtggtcgccgtatcattaaaaaaaaaaaatcaaacaataactatgaaccttattagtgctgtaaacacatagattagcgcaccatgaaataccaatagtgctcaacattcatctatccacacactcgacagtacacagaccctcacagctatacatcctcatctggtagttgcagtcaagtgggggcggagatgtggagcagagaaggtgaatgtagttatcaatggaatgtaaaagcaatgaaatactgtttaagttaggatttagctgaaagtttagttttgtagaagaggtcgacgcatacgcggttctctcttggctggcgctggttgggatgaggatatctttctggtcatgcagaagacgggataggagtgacactctggtcttggtggctaggaggtgtgtatgatgtaggggtgatgatgatgatggggtgacagtgatgttggggtgatgatgatgctgtcttttatatattgccggcgctttcaacgtgacgcgttgtctatttctcggtggtcaccctgttgacttatattaaatacatcagatgttgcctgcacttctccttctgttcctgtccatccactccgccttatgcaccaagatcagctttcggaataccagccatccctttgatccagctcctttttgctcacctcctccactcgtactacctctgctccacctcctcctccgccgtctccgtaagctcacctgcatcacggaatggaccgtagaaactagatgcgtatttaataccataactcatgattggaatattgtagtaaccagcatcatctaaacctttacggatttcagcaacgaaaccgtccatcatattgcttggtgcgataatgtcagcccctgcttcaacttgcgatatagctgttttaaccaataaaggcaatgttttatcgttatcaacgtcatgtgtatgatcatcgattaaaccgcaatggccgtgatccgtgtattcgcataagcaagtatctgctaatacaagcatatccggataaagatgtttagatttgcgtgttgctgtttgaatgataccttcatgtgcataagcacctgtgccaaccgcatctttttcgtttgggacaccaaagaacatcaatgctcgtattactaaatcatacgcttcttttagatcttcatctaatcgatttaagctgatttgataaataccaggcatggaaggaatttcttctttaacgtcatctctttacactaccttataggctacctggttgtcatgttgctgattggtgcatactttacaaaacgtgctggtcaaagtaaggacagcttctttacagccagcggacgcttgccttcatgggcaattggtttttctatctatgcgacgacgttaagtgcgattacgttcatgtcgacaccagagaaagcattcttaacagattggtcttatatcgcagggaacattgcgattgtcgcaattattccgttattgattatcttttacgtaccattctttaagaaactgcgtgttacatctgcgtatgagtacttagaagcacgttttggaccaagtgtacgtgttatcggatcattgttatttgtgattttccatttgggacgtattgcaattgtgatttatttaccgacactggcaattactgcagtaacggatattaatccgtatttagtcgcaagcttagtagggattttatgtatcctttataccttccttggcggtttcgaaggtgtggtatccgcgtgtgactcaacatcagtaagtgcaagtgactcagcgtcagcaagtgcatctgattcaacatcagtaagcgcaagcgactcagcgtcagtaagtgcatctgattcaacatcagcaagtgcgagcgattcagcgtcagtaagtgcatctgattcaacatcagtaagcgcatctgactcagcgtcaacaagcgcgtctgattcaacatcagtaagtgcatctgactcagcgtcagtaagcgcatctgactcaacatcagtaagtgcatctgactcaacatcagtaagtgcatctgactcagcgtcagcaagtgcatctgattcaacatcagtaagcgcaagcgactcagcatcagtaagtgcatccgattcaacatcagcaagtgcgagcgactcagcatcagtaagcgcatccgactcagcgtcagtaagcgcaagcgactcagcgtcaacaagcgcgacggattcagcatcagcaagtccacgtgactcaacgtcagtacgttcaagcgactcagcgtcagtacgcgcagtatcactatgtaccgacagagttcggcgattatactatttcaattatgaataccaataaacgccgcgaattaacagaatctaaatataatgaacgtttagaagaatgccaaaaagctttagcacttttacaacaagaattagatgtggaagcattaggccatattgatgaagcaacattcgaagcacatgcacatctgattgatgatccggtgctattaaaacgtgcacgtcatgcagtaactgaaaatgcacgtgtcaaagcagcatatgatgcattagaacattctgattttgaacgcttcgatcaattgctgaatgaaagtcatgcatcattaaaagatgattatgaagtaacaggtgttgaattggatactttagcagaatctgcacagcaagttgacggtgtattaggtgcccgtatgacaggtgcaggctttgccggatgtgcgattgcattggtacatcaatcaaaaatcaaagcattagaagaagaagtcacacgcaactacacagaaaagattggttatgccccttcgttttatcatgtcaatatcggtgacggtgttaaatcaatctcttttacatttattcaactatattttaatcattataagaatcactagtagaggttagaaggttggtcctttggttatttcgatacgccagtcatttcctgtgccaatatgatagagtttagaaaatgaattttggttgaccgcaacgcctatattaacgagtgagttaatgtaaactagaggttcaccaatgttgacgtccgcaaaagaacgtacgaatttcatgatgttttgatagactttgttttcacggttataaatggtcacaatcaggttatctccatggtgtatatcattctctttaaagtaagaaagtggaatgttggtccatagagagccgaagcggatatctaagacatcaatataaccgatgagtgtatcgccttcttgtctagaatcgttgattggaagctgtttgattgagtctaaatcaatagactggcctaaatcttcaaattcaatttgaccggcagctaagcgagcgccattataggcataaatatcacgaccatggaaagtatgactttcttcagaatgcggtaaacgacttttgacttcatctatcgcaatgactgattcaatgccttcataatgctgatctagcattttcaaacgatactttgtgttttaaagtataagttttttttttcaagcagaagacggcatacgagatcctctctggtctcgtgggctcggagatgtgtataagagacaggttctaaagtatccccatctatcgcatttttcgttgaaagtgttaaaaataaccaacgcgcttttggtttttctttaacaacttcttcaatcactttttgagcttgataactatttttcatagcacgcctccaattacaaactgggcagagtttcgacttacaaaaccatgtcttatgtaacttcaaataaccttcatcagtcggcttgaactctaagacgttaccacattgttttacattaaaagccttttttatttttaaaatttccagtatatctgcataacttacattatctatcttcttcactctccatgggcgttgtttcccatttttcgtcgtatctttaagtgtttcgttatattgattttcgtctatacaactagtagtattatattacatataaagagacctccagtagttgtgtattgagtagctgtgtttcagcgcggctcgatagtgtgtctgtgagactcagaggtgcggcgtacaatagcgttgtaatgtgcgtatctgctgtgtgttagatggtgcatcggttgtgagtggtagcaggaggagtctgaacgtatgagggaatatttttttttattaatgatccggcgaccaccgagatcaacacaaggagtatcgtcggcagcgtcagatgtgtataagagacagataaaatccactgcattcaatcatgctgcatggaatccactgcattcaatgacgctgcatggaatccactgcattcaattgtgactgtctcttatacacatctccgagcccacgagaccagagaggatctcgtatgccgtcttctgcttgaaaaaaaaaaaaaacagaaaacaaacagcacagacaagaggtaagcaataccgaaaaacagcaactacacagagaacgcaaccggcaaatcagcgcagcgtacaagacggagcacgaagacgccgatatcagcacacgaagatagcgaacggtgtaagaagctgctttattcgcaaaatcaatggccttttctagattcatttgtttcatatcaaaagcactgacaaaggcaccgatgaatgtatcgcctgcagcggttgtatctactacatctactttataagcttttacaaggccagagttgccttttacagcgtaatacgtaccttgtgcacctattgtaatcaaaacgactttaatgcctaagtttaagaagtagtctgcattttgtgccattgagttttcatctttcactggaatacctgatagaatttcagcttcaaattcattcggaataatcacatcgatgagttttaacagtgattctggcaattcacttgcaggtgcagggtttaaaattgttgtaacgttgtgttcgcgtgcaatttcaaatgcacggatgattgccagtacagggacttctaattgtgccactacataatccgctgctttaattactgcttcagcttgttctacatcttcaggtgtaatatccatattcgcaccgccatagacgtaaattgtattactgccgtctttatcgactgtaataaacgcttggccggtatctgctgtttctgattctgtaatatattcagtattcatacctgcttctttgaaaccagcaaacataaagtctgctaaaccatctttgccaacttttgaaataaatgttgtatctgcgttcatacgtgctgtcgcaatcgcttggttggcacctttaccgccaccgtatttcatttgtccttctttgacgtgaagcgtttcgcctggtttggcataacgcaccactgtttacgacagtgcatattccattgtcagtcgcttatgtcatctttatcgtattctggcaagtcggtttctctaacgctgtgaacttaacagatggtatagacggattggcaaccggcttatctatcatcgcatttgcgatgtatgcgattatgagctttatgctgggcgaccatgctgtgggtacgttttgtatcattatggtctttgcgttattaggtttcttattctataacgtcaacccggccaaaacattcatgggggatacaggcagcttggcattaggcggtattatcgcaacagtgtcgattatgctgaatgcggaaatctcattactgtttatcggttttgtctttgttgctgaaacattatctgttattttgcaagtagcatcattcaaattaaccggcaaacgtatctttaaaatgagtccgctgcatcaccactttgaattaagcggatggaatgaatggaaagttgttactgtattttggacagtaggcctcattacaggtttgataggattatggattggagtgagtctcacgatacatttctttcatatcaactaagatttactgtacacatctgcttatctttttcgttccactacttatcttccacagactgccaatttgcattgttttcggtacttcgtaaatctataacctccattctttactttgtatttaatattgttcagtccttcggtacattttccctactatgacttctgctgacttctcataattcgttgttactacgattcgaagaatcgcttatgagacctcctcgggtaagattaaccactttccactcatgtcattgcatcatttactcatacgaattcgggcagtatcggactttgttttgttaagcaaactcatccgttcgcataagccttgatatgatgtttctattcgtcaatgcgagtgtttgcgtccgacttccttcagattccacctcgcgatggacacccttgtctttcgctaacagttcctactgccaagcctgtaatggactttcaccatcaagttgctaatcatgccgagcgcacttaaaatatccatctgacaactgctttgccagatggatgaaaatttaaatgatttgtttgtcttctaaatattgaacgatttgtgcaactgcatcttgtacagaagttgtttctgtatccactacaatttccgcattttccggcacaatgccgacacatatggagatgattaaagcacggtttaagaattgatattgtgtgagttgttgtatatattcgaacattgatcgagctctctttctgtttttatagtgtcttaggtgcctgattcatgaatgtctcatttaaacgttctgtggtcattgcgtctttacttggtccgaagtagcgcaatgtttggtttaataaaataatgcggtcaaagtaggttgtcgcctttgataagtcatgatgtacgattaagattaatttgccttttgcttttaatgcttcaatcttctccataattaattgttcgctggtgtagtcgatgccgacaaaaggttcatctaataagtaaaggctgcttgtagtcattaaagcacgagcgactaagacacgctgcaattgaccgccgctgagttgagaaatctgacgttttcttaaatgcgtcagctgcatgtcttctaaaagtgctgttaaacgtagtttgatgtttgcaggagggcgtttaaaccatccgatatccttataggcaccagataagacaacaccttcaacatgctgtataacgcagcgctttattactgaatttcggtatcaccatgcgcaatagaatcatcgcaatcaatgtacttgatagcgagtggccgcttgggaaggaaaagccggtatctactaataaatgatcataaggacggctgcgctgaaaaatctcctttaagagaatgcctaatattcctccgaatcccactgtcgcaagtatccataaacttactatgtaataacgtttcacaaacaatatgactgcacccgcaacagccagcaagacaaaagagaaagcatctccgtacgaagcagctaaagtcataacatcattaaataaaccaccgttataattcattgcaggcaccttaaacatatgattaaaccaattcaatacggctaaatccattttatgtacaaatccaatatgcagacatacaccaagcatcgcaaataccagtacgatgaaacttgcgatcatggcacatgtttctaatgaactctttctgtttatatccataatctattgctccatttctcttttcatagattataacgcattgcacaataatttaaatccgcttaaagtcttataatcgttccaactaaatttaattgtaaatctccggtcttataagtatagattaatccagccgtaacaatcacaggtactacaaatcctaaaagttttatacctgttctagataaagcataatgaattgccataataagaacataaatgattatcggtaaaaatttatgtaaatattccataaacttaagtatcctccaatatttaaaactattatattttatgtattatcatttttcataataacgtaatttagatatttattcattgcttttttagataatttttgaattctcttgtcgcctcctctttatatttagctttatcaagtatagctacaaatacaaacttaaatggtctaaagttgccaaaactatcacttataattaacgctcattacgcctcataaaagttaaacatgtttcacgtaaaacatttgtatgtaaaatacattaattcgaagtgcagttattaacagctttgtcccaacatcttaaaaatttatctagaaacgtgtctttataaagtcttaggtcaagcagaacgaccaaaatggaaggattactttaagaagtcattattagatgcactgacagaacagccgcatcattataagatagaaattattccgattaagtatgtacgcaccaagcctaaacctaagcttcaaaccaatactgcgccgacaacgagatggtcgattgatattttcaaaatgattgtcattcaaacactttgcgtcttaatcggtatgtgggtctattcctttgataaaagcgagtcgagtacgattattctcttgatgttcctcatcgggattatcatattatcgatttggacacagtcttatctcatagggtttgcggcttcgattttaaatgtgtttgtcttcaactatttctttaccgtaccgcgctttactttagagatgtatcgcttcgcttatccgattacttttgcgacgagtatctttgcgagtttattgacgagtgctttgttgaagaatttaaagtatcagcacactttgacagaacgccagctctaccgtacgaatacaatgctgcacttcaaccagacgattaaacagtctgtgcacggacatacgacaaagataacgcacaatgacaaagggatatttcatggactgccgaaacaatttcatgttatgcgctatcattcattatgcgcagatgctgcgcgtatacctgaatgtctggagattactgcacaaaatgatgcaggtatcattatggcagtagcacatcaaaactatccggtagatggtgtgcagtatcatccggaatctattttaagcgaatatggacatgaacagattcgactattgctacaacaggcaggtgagtcacttgttagctcaatttaactttcgttattacactaatgaaacagaatataagcaatatcaatatgcgtttaatcagttgaaggagaagcggattgcttatcgcttagaagaggataaagatgtcatcgactttgcggaacaagcacaacatgcaggcagctttgtaggtgtttatctcccttatgaagcagcacctgccttcaatgcacaaatggaagttcatacatcaaagcaatcaccgtatgtttatgcggcggcttatgtaatcgaagcacctgttgatagtcaccgtgacacgcagcatcgtcctcgagtgtgagtgtgtcttgtgcggcgtggtggctgttggtgtctattagtgatataaaggacacggcgagcagggagatctacacaaggggtatcgtcggcagcgtcagatgtgtataagagacaggctcagctgcttgattattgccagttgagcagcatgattcgtcactgctgagctccatgcttattgcctgctgattgcgtggttcgtgtctgctcagctctttgagtattgcctcctgaggtccctgttcggtcgccacctgccggggaccagccccaactgatccagggtattcgaaggagagatggcctaggcgactatttatatgctaatcagagatgtcaagaataatagtatgaggagagctcagtaggaaaattcggtggagaaaagagactgagtagcttgggttacgcggaagccccatcaaacttcacgacaagaagtttgccaccctttcgtaggccgcagccgccctctccaacactctaacgtgcctacccccagcgacctctccgcatctgacgatgatgtgattgatcctgaaatgttaggtatagaacttacacgacctgctagggcattgaaattatggatcacactgcaagttattggtgaagatgaaattattaaacgcattaaatacggtgaagatttagcagagtacgctgaatgctatgtatcacaacttgatcattggcgtatcgtttctcatgccaatctctctattgttaacttcagatatgaaaatgaagatttaactgaagcacaaaacaaccagctcaatagtatggctgcacaaaagatagcagattccggctatgcggtagcatatacaaccgtactaaacaatcaacgtgtgattcgattatgtacaacaaacccattaacaacagaagatgacattaaagaaactatcaatagactcaatctctatattagtgaggcgcatatatgaaaaatcctagagatttaactttctcaaagcttctaaataagaaatataaagtttcagaacttcaaacgatttgtgagaatttcaacatacctgtgagttctaagttcaaaaaacaagaaatcatagataaaattgtacaacgatttcataatcatccagatgaaatgatcgaatctaatttagatgaagatttgattgaaatggtgtgtacaatgattgtttcaggacataattcgagtggcttcttaaaaaatcagctaaaaagttattttgtgtatgaaaataactatggattaatggtgccaaaagaagtaatagaggcatttaaaagttattttgcaccatatccaaaaataaatgcacctaacaatataagtaaaaacaccgtgaaatgaccattaaaaatgaatttgctatagtaacttttttctttacgaatcgctttatatctccgattaaacagtgataatgattgattattcattggcattgccaccttgtgtaacatgtatataaatatcatcaagtgtatgatgatttagatcagtttgcgttcttaattcctctaaatttccaaaggccacaacttcacctttatctaaaatgataaaacgatcacagtagcgttcggcagtggctaagatatgtgtactcattaacactgtacgcccttcatttttcttttctaccatcaaatcgagcatcgattgaataccgagcggatctaatccaagaaatggttcatcaataatataaagctcaggattaacgatgaaggcacagataatcattactttttgtttcatccctttagagaagtgacttgggaatacttgtaattccttctctaagcgaaacgtctttaataaaggctgcgcacgtttcatcgcttctgctttatcaataccgtatgccattgcagtcatatcgatatgttcttgcagtgtcagctcctcgtaaattacgggcgcttcaggaatataagacaatttatgtctgtacgtaattcttctattcttacgtaatattagaacaacagctatttcagtagtatcaatcccattgtccattctaattgctatggtggctttaaagttaagtaatgtatcattaaatattctgacattaggtgcattaactgtcgcaataggacgtgtgattgatgactctatcgtcttagttgaaaatatttatcgtagactatcagatcccaatgagacaatgaaaggtgaaaatttaataattaatgcgacaactgaagtatttaaacctatcatgtcctctactttagtaacgattgtcgtatttttaccacttgtctttgtatcaggttctgtcggtgaaatgtttagaccatttgcgctggctatcacatttagtcttttagcgtcactccttgtttccattacggttgtgccggctttaggttctacacttttcagaaaaggtgtgaaaacgaagcgtcagcgtgaaggtttaggtgtgattagcaaagaatatagacgaatactaaaatggtcactcaatcataaatgctttatgggtaggagcaatgtatctattgcttgcgaagaagaacttctgggttgcggcagtacctgctacattcatgacttggaatatctttgtatatattttaagtcagaaaatcggcttcggtttagatttaacattaagctattatctcggagcggtactgactctattatgggtcgcatactttatttatcaatataagaaagtgacatccgaagtaaaatttgaacttgatcatcatatttcaaatcagcatacacaagtcgtataaataatcacctcgcttcttaaagaaagaggcggggtgacactatatgaccaagtagttttaatttttgtaaaaaatgttattcttttgcatacaaactctatgtaattgagaataaaaccataaaattttcctatgtcttaatgtaaaatgactgttcataacttataatgaaaaaatgagaaagttgaatagatggtggcaaatctgatgagaaggaggtggtgcctatgggtacgtttctcaacaacttcaaatttttcattgctttcagaaagatatgcatcgacttgtgcttttgtattcaaaaccgtacgcctgccatcttctgaaatcagctcataatgtctttgagaaaaacgaaacggtaattgattgccgtctctcgtagtaatcataacaggtacgctgacaataaaccttccttcagggtagcgagatttataagcttttaatgcttcttctaaatcttcttgactcgaattaatgaaaaatgcatatataataccgactttagcttccgctgcttgaatcgcagcatttaaactcgtcccaagcaaataaatcggaacacttgggtgggtactgtctcttttagctgttttaagtccagcatattttgagtctgggtcgaaattttgtgtattcagtcctcttaaagtctcaaacttttcattaaacgaaagtccatgctcttttaaatcttctttcaatatacctgttgctttcgggaacccgccaggtgctttgcccaccgctaaatctgcacgatggtttgataattcgtcaatcaaatggaattgttctatcaccttcaacggatgataatgcatcagcatgacacatctactaccacttagacgtcctatacgattcattgcatctttaacaattttacgtgtacctaatttatcgtcagcaggcgtaccattatgaggtgttcctacagtagtgatagttgatatcatattatcttttccacctttgaagagagctaataccgtaccgccatgttgacgttgatagtctatttcttcttgatttccatttcttaagaaatgctacatcaaacgaatcgtttgaccacccatactatgaccaactaaatgaatttttttaccaggtgcccaatccggcataataccttcatatgttctaccataacgatgatgaccatatttagccgcatgagctgcaccgtagtctacgcgactgcctttaatgtagtagtacaagtcaaccgcacgatcatagttactgctaaatgctccaatattagcttcatgtacccggtaaccttgtttagtcaattcacttttaatattatatttacctccaccccaataatttcttatatgaacatcctcaagtaggccgtattgtagttgaaaaaggtatcatggcttcacacgcacgacttgctgcgaaaaaagcacgtgaagttacgcgccgtaaatcagcattagaaatatcaagcttagctggtaaattggcggattgctctagtaaagatccatcacgtagtgaaatctttatcgtcgagggtgactctgccggtgggtctacaaaatccggtcgtgattcagaaacataagcgacattgccattgcgtggtaaaatcttgaacgttgaaaaagcacgtttagatagaattttaaataataacgagattcgttcgatgattacggcatttggtacgggtattggtggcgaatttgatttaagtaaggcacgctatcataagattgtccttatgacagatgctgatgtcgatggtgcacatattagaacattgttattaacattcttctatcgctttatgagaccgttaattgaagcgggctatgtttatattgcacagccacctttatacaaattaacgcaaggtaaacaaacgtattatgtatttaacggtagagagttagacaagcttaaagctgaattaaaccctactcctaaatggtcaatctctcgttacaaaggtcttggtgagatgaatgcagaccaattatgggaaacgactatgaatccagaacatcgttcaatgttacaagtaagacttgaagatgcaattgatgcagaccaaacatttgaaatgttaatgggtgatgttgttgaaaatcgtagacaatttatagaagataatgcagtttacgccaacttagatttctaagcattatgaattgaacttttgaaggaggatatcttgatggctgaattacctcaatcaagaattaatgaacgaaatataaccagtgaaatgcgtgaatcattcttagacctaccactacatcgtacctgaatgggacaacgtagaacctaaattaaaccgcaatgtcttattagaacgtttcgaatttgcaaaacaattaaatgtgaatgcacacccagtgatcttaggtcctgtaacattcgttcaattatcacgcggcggagaacaatcatttgaagaaaaaatcgaagcattgcttccattatacaaagaagtattgcaatcacttgttgatgcaggttctgaatacatccaaatcgatgaacctgtattagttacagataacgcaaaagaattacaagacgctacacgtcatgtctatgactacttcgaaaaagctggactagctgacaaattagtcatccaaacttacttcgaacatgttgatttagacttcgtcaacacattaccagttaaaggtttcggtttagacttcgttcatgaccgcggcgaaaacttaaaacaattcaaagaaggcaaattatcaaaagataaagctttatatgcaggtattatcgacggccgcaacgtatgggccctctctggtctcgtgggctcggagatgtgtataagagacaggttcttattcgtttccagcattttgttataggtgcggtctaacgtggtgtatggatcatgttgaaaaccttcaatatcattgatgatttcaccagcaacctgtaataatgcgaaagccctacctattcttgcgacaatctcatttgttccagccttttcaataagtcgtttctcatggcttttaaacgagttatagtagccttctttatttttgcgatattgttctataaaagccatgcctaacgtcccgtattgcttgttaatgccttcgtacaagtcaataaaagaaacgtcactgttaaacgggtcatcttgcaatgtaataaccctagcaccgataccagctttttcattgccgttgtctgctaaagaggtttcacctgttgaaagcataatgttttgccatgttctctacccttcaatactcgacttgctcccacgacctttttcacgaccaccgctcaattgatatattacatccatcatcatatacaccatcaacagaagagaaggcaagaaaagaaagcacaacagaacagccttcaacagaagaaaaagcaacaagtgaaagtacaacagaacaaccttcaacagaagagaaggcaagtaaagaaagcacaacagaacaaccttcaacagaagagaaggcaagtaaagaaagtacaacagaacaaccttcaacagaagagaaggcaactgaagaaagcacaacagaacaaccttcaacagaagagaaggcaagtaaagaaagtacaacagaacaaccttcaacagaagagaaggcaagtaaagaaagcacaacagaacagccttcaacagaagaaaaagcaacaagtgaaagtacaacagaacaaccttcagcagaagagaaggcaagtaaagaaagcacaacagaacaaccttcaacagaagagcaagcaagtaaagaaagtacaacagaacaaccttcaacagcagagaaggcaactaaagaaagcacaacagaacaaccttcaacagaagagaaggcaagtaaagaaaatacaacagaacaaccatcaaccgaagagaaggcaagtaatgaaagcacaacagaacaacattcaagaatatgacgccttatacaattaaaagacatcaatcgcagcaccatcatccgatcatttcgcataggcaaattgccagcggtacagccatccgcaaatcgcttgaaaacgaagaccgattatttgaatcagttgttcctgcagctgtgaaacagctttacaacaaaccgcaccttactgttgaagattgcttcccttatctcaaatatgcaattttacgtgcttcgccagaagaactgcagcacattcacacagtcagcgaaggatttgaacatcgtttaaaagcacaaattctgcattcacaaagctttgatcagttgatgtctcaacttaagaccaagcgctatacttatacccgtatccagcgtatgttaatgaacatcttgttaaactttaaacaagcagaaaaacaagacaatgtatcagcggttcgtatcttaggtatgaacgaaaaaggtcaagcttatttgaaatcgctcaagcagcaatttccagatagacattatattacaaacgtcaatcaatcgactgccccttacttcaaacatgagatacaagcaactacggtatacaattggatgtattatattgcatataaagagacctccagtagttgtttattgagtagacgctttaatcatactactggggtttttttatgtcaaaaattcctttcaacaagaaaaatagctataatcccttacataccaaggattacctgtctcttatacacatctccgagcccacgagaccagagaggatctcgtatgccgtcttctgcttgaaaaaaaatataatcttctattaatctttgctttacttctttcgattctacaagtactgatacccccttgacatgcgctttaaactcattcatcaaattcatcacgccgttaatcgagcccccggcacgcataaagtcatcaacgattaaaacgtttgaattttctttaagtgtgcgtttcgacaagaccatcgtttcgatcttgcgcgaagagcctgaaacatagttgatagagactgtagaaccttctgttactttattatccttgcgaataacaactactggtaaatttaatacatttgctactgcattggcaagagatatcccttttgtcgcaattgtcacaatcgcatcgagctcttcatccatataaattgtagcgattaatcgcccgactttatttaataattccgggttgcccattaaatctgaaaggaaaagatatcctcccggaagcaagcgttctttttcttgcaagagcacaattacttcattaatgacttcctcagcttcttctttgctcattgtcgggcgatacgtaacacctccgctcgcacctgccgtagtaatgactgttcccaatttctccttatgcaaggtttcgcgaacaatgtggatgtcttcgctgatagaagacttagcttgtttaaacttcttcacaaagtgcgttaagggtatcagtttattcgggtgacacattaaataatgcgtcatgtacacaatgcgctcgcttcgtttataacgcaagagaatccttcctttcttatcctaataatcttactaaatagacctcgttgcagcacccatgcactgcattataaatattttgtgcttgcttgtaatgctttgccaaactataaacggtcggtccgctgccgctcatcaatgcaccatctgcaccgctgttcagcatgtctccattctctgtgctgtcttgcttttctcagtggccaagcccggagtccatagaggggacccttgacctgacctcaattgcaccatcctcgccaggccttggttcccttcagctctaactgtaactagagtgctttgaggggactttaatcacagctgcttatcttagaattcctgctgctacccaaaggctttggaaccacagaagggacgtgaggtcaagtcctggctctggcacttgttttctgggtcatcttgggtgaactgctttgcctctctgagcctcagtttctttatgtgtaaagtagggataataatggaacctacttcatgagagtgttgtgaggattaacagtagtaatagttgtaatgacagccgccagactttaagtgtttactatgagctgggtgggcttccaagtggtgctggtggtaaagaacctgcctgctaatgcaggagatgtaagagatgtgggttcaatccctgggttgggaggatctcctgaaggaggttgtggcaacacactctccctttcctccaaggcgtcttccaaaacttccatcgccatataggcgttactgtttccaatactcaaggacatgggtgaaagtgtacactttatcagtgtaaatttattgaactattgatatttaggggaaagagacagcagctcacttgcagatggagtaatagggagaaacgtaatggagattctagtttgttctactgtctttctctaaggactttctcagcatccagcactatgctgcatgttaggaaaacagagactgaactaccaagcctggtctccactcttaaaacacttctggaggagtaggcagtcatggaagctgcacactcctggtgagggccacgggggtacaagcgtggaaacccaggagtgcacagaggggcacctgctgtagaatgggggtgaaggaagaatccccggcgggggcgcctgggctgcatcttgaggacaaataggagatgggccaagaagaatattaaaggcagagaaggagatctgcctttgataaatgaaagcgagatgacaacttgaaacgactacataaacagtttggtcaaccaagagtaattgtcacggataaagcgccctctattggttctgcatttagaaagttacagagtaacggtttatatactaagacagagcatcgaaccgtgaagtatctcaataacctcattgagcaagaccatcgaccaatcaaacgacgcaataaattttatcgaagtctacgaactgcctcaaccacgattaagggcatggaaacaattcgaggaatatacaaaaagaaccgaagaaatggaacgctcttcggattttcggtatctactgagattaaggtcttaatgggaatattagcttaagaacaagaaggattataaaccttgtatttgatttttaaactttgcaacagaaccctctcgctttatatttgattccacttttgcaaccaactgtttaaggctaaaaggcttagtaatatagtcatccccaccaatacctaagccgtttataatatcctcttctgtatctacttcgtatgtgtggtataatgttgtaagtatgtattggacgtggttgatgctggagactagtcctgtgtttgtgtctttctttgtattggaaagatggagaatgtagatgtataggctttggagttggtggttttttgtgttttttttttttgaagcagaagacggcatacgagatactctctggtctcgtgggctcggagatgtgtataagagacagctatattcaatcgggatgctttgggccatgctgcataaaatccactgcatttaatcgggatgcattgggccacgctgcatggctgtctcttatacacatctgacgctgccgacgatactccttgtgtagatttcggtggtcgccgtaacattaaaaaaaaaacaagattttacattttaatacatgcccaccttcactatcatcttaaaccaacaactacctgtacaaccacacccactagttgagccatacgctctctgtgttatataatcctcatcatgcacatccacacaatcgcgctattttgccccttaatatatattacacttagattatatcaagaaagcgctttaataagttcgtattgtgataaaatacacataatactcaaaatatttgtaaattgtaataaataactagtacaaattttaaaattaaatttgtaaataggcctcttttgcattattaaaacactgtgcaaaagagacccaatatatttcttatttattttttagtgcatttttcacattttggactgactcagctgaatattttaattgttcttgttctctctcattcaaattaacttctacaattttttctataccgttcttgctaagaatagttcgaacacctagacaaatatctgagaatccatattcaccttctaagtaagcaacgcttggtaacaagcgcttttgatcttttaaaatagcttcaatcatttcatatatagctgtagctggtgcataatatgctgaacctttacctaataattctacaatttcagctccaccttttcttgtgcgattgactatgcctggttaaggagggtcattgttgatcaggattcgtgtctgcgctgcgtgggtagtgggtcggggtgtacagtaggcagcgtgttgtgtgtattgtatattaaacggcgccgaacgagagctacagaaggagtatcgtcggcagcgtcagatgtgtataagaggcaggctcctacaatccatggggtcacgaagagtcggacacgactgagcgacttcactttcacttttcactttcatgcattggagaaggaaatggcaacccactccagtgttcttgcctggagaatcccagggacgggggagcctggtgggctgccgtctatggggtcgcacagagtcggacactgtctcttatacacatctgacgctgccgacgatactccttgtgtagatctcggtggtcgccgtatcattaaaaaaaaaaacttgatccgagacgtgcgacagtcacattgtaaacataagacctcgtcttttgcctgctctttatccttcttcgctttctttcgtgcgtttccctcttggcctcatcgctccatctatttttttttcacacatgtcactcatcactactctgcaccgtgggctcggagatgtgtataagagacaggtcccatactctctattttgactttataaggtcgattccagaacgatttaattgctatccacccatagaccacaaaagccacgattaatacaaatatgtaattctgcaaagaactgaaacttggattcacaaaaataaatgttattaaaaagatcaatgctgcaattccataagcaatccactgcagtaatttaatgccctccgcatacatcacagcagtgatatacactacgtaatacaaacctgccatcaacaacaataataatatggtcataagcgctcctattcttccattactttaactttgatgtctacccaactcatatcatcaattttattgatgatatgataatatggcgacactcttttaagattgtttaatttcgcaaaattttctatttctgttaatacttgtttttcttctttttcatattgcttcgtctttaatctgccttttagcatttgatcaatgtataggtaagttctaaatcatcacctggtgcaaatggcatgtctactggcatcatcaatgtcgtctgttgcaacgcatgtcgggttgagacacgcgtggtttacgttgtagctgttgtgcggttatcacagttggactgttttttttttttttaatgatacggcgaccaccgagatctacacaaggagtatcgtcggcagcgtcagatgtgtataagagacagatattataacaagaacacgcatttatgccgagaaaatttattgtgcgttgagaagaacccttaactaaacttgcagacgaatgtcggcatagcgtgagctattaagccgaccattcgacaagttttgggattgttaagggttccgaggctcaacgtcaataaagcaattggaataaagcaattaatgcgatgttccgaaaatgtttaacgaaactacgccgactatgattaaaactatagatactgtctcttatacacatctgacgctgccgacgatactcactgtctacatcgccgtggtcggccgagcatgaaaacaaaacaaacagtagctctccgatggatgacgaacacacatttatccgccaagcattacttatcttgatcagttaaaagaaagcaagcgactagcacagcaagaacattttaatatttggagtaatggggttcctgatagcgaagctgcacaaaatggtgtgccgtcagactcccaagctgcagcaactccttcgcaggctgagtcgactgaatctcaaagcggaactgcctcaaaacattatgcaaattgcactgcattaagggtggattacccgaacggtgttcctaaaggtcatcctgcatatcaagataagatggatagagataaagatggtatggcatgtgaagtcaattagcgggtaaatgaaaatcgtaagtcaacaaaattcacgtgataaaaatgattgtaaaaagtaaatggctatgctataattcttgattgtgagtaatgaaaattattccttgcttactccaattgagagtaagccgtatagtccctgtctcttatacacatctccgagcccacgagaccagagaggatctcgtatgccgtctaaaaaggtgcgatgacgaatgtattgtttatgactgcgacaccgattcctagaacgttagccatctctgtattcggagaaatggatgtatcttctatcaaacaattgccgaaaggacgaaaaccaattaagaccatgtgggcaaaacatgaagcgtatgaatctgtattgaaccaaatgacagccgaactgaataaaggcagacaagcttatgttatcagtccgctgattgaaagctcagaacatctggaagatgtacaaaatgtgattgaattatatgtgtcgctggagcagaatgatggtgtcgtgcgtgtcggattattgcatggtaaaatgtatgcgaatgataaagatgatgtcatgcagcagtttaatcgacatgaaatcgatattttagtttcgacgactgtagtggaagtgggggtaaacgtccctaatgcgacgtgtatgagtatttatgatgcagatcgtttcggactcaccacgatccaccaattacgcggccgagtcggacgcagcgaacatcaaagttattgtgttttggtcaatgaagcaaacgttgcgttagaggcagcaaaagcagctttcaacgaagcagtgtctgacaacttagttacaccagaagaacaagcaacattgaaggcacaacaagctaacgcccaaactacaaaagcaatagcccaaagtaaagttgacgcattgccaacagaattaaaaggcagcttagaagaagagttagcacaacttacaggtatagatgtaccggaaatcaatgatgcgaatgcaaacggcacaaacgacatccaagaccaatggttgaatgatgcaatagaagcagtcaacactgctaaagttgcagatcaaacagctaaagcacactacaacgaagccgttacagacaacttagttacaccagaagaacaagcaacattgaaagagcaacaagccaacgcccaaaacacaaaagcaatagcccaaagtaaagtcgacagcttgccaacagaattaaaaggcagcttagaagatgagttagcacaacttacaggtatcgttgtaccaaacgtaagtgaacaccatgtatcagaagcatcatctgaagtttcatcagaagtaaaccatgatgcagcatatatgggatcgctttacttgctgatatatagtttccacatgccgtcattcctgtttatcagcggctactttgcaaaaaatatcgggaaacctgatcatttagagaaagttgctaaaaaactcttaattccatattttgtgttctttacattcttttcgatttattattacttaacggacaaaagcagcaacttgaaattggatccgtttgatccggtctttgcgctttggttcttactgacactctttatgttccatgtcatcttagtcatcgtgaagaactttaagccctatttcgtattgcccatcgcaatactcgtctctttattagccggcttttcatctgatatcggtgaatacatgagttattcaagaaccattgtcttcttccctattttctatataggctatttgatgaatcgacatcaatctatgttgctgcgcaataaaaaatgggtaccgatttccatcctgatattggtcgcattttatgttgtgtatacgacttctcagagccaccatgagaagccccctgaggtcacctgcacaagtcgagggaacccagggtttcctgcctcaacccgggaaagacctcgagagaccttcttcaacacgtctcgaggccagagtcccctaccatggctcgggagcaatgacgcgctccccctcgccactcgcatggagacccgacttccctggcgccccacgcgaggctcactgacctcgccgtcgtacctcgtgagaaaccgcacacgggggccgccgctcgagaacaaccccgagattcccccgtcatcgagagatgagggccttcgtctcctgcatggcctagcgaccaatctcgcggcctctctccaaacgcctcaggaggcttgactcccttgagtccacccagtgagctccaagagatacccgtcgcgactcgagagcagagcggggttctttgcttccactcgagatgaatgcctgtctccccgggtgcgtctggaatgcaaccccgagatccctgtcgcccctggagaggaacattggcttctggacacaagcctagatgaggtctattggccctgcaggcactcgagagcaatccccagctttccttcgcaactcgaatggaagattggacttgcctgggccaacacaagaggcagcctgaattccccgtcgtaactcgagaatcccgccgtaactcgagaaaaaccacgtggctcccccgtcatcgcaagatgaagccctttcccgctacagcgcctcaggagaagtcccacgttaggaattggaggtcgaaagggcacttggcacccttgatgcgacccacaaagttccccgaaatcccggtctccctcgagaggaaccctgaggttttccggcaccccctcctctgagccctttctcccctcctgatctggacaggagggtcgactcccctgctttgtctggaaggggttcccgaccttccggtcgcacctcaggatgaggccggtctcacgaagacattccagacgtggcctcgtgggtggttccacattccgtaggaccccgatttcccggtcccctcttgataagaacccgatgcccggacacctctccgaactccagcctgtgaatgcagtcaacacgaaggggcagtttttccgtgcatcgttcggaaaaaaccccaggttccaaatacagctcgacaagcggcctctctccccggggacactcgagaggcaagcggagttccatgcctcaacccaagacgaggcctgactctcctgtccccagtctgcagggaccctgcgatcggagtctgaaatcagaggtaccctgcggttcctgcctcaactggagatgaggccctcttccaatgcaccaagcccagtggagtcccgagaggcccctcccacctccagtttccctggcttctcagagccaccatgagaagccccctgaggtcacctgcacaagtcgagggaacccagggtttcctgcctcaacccgagaaagacctcgagagaccttcttcaacacgtctcgaggccagattcctgtactggcatcgtgtctgcttgttggctatgttctattcgttctccttcgccgtgcttctctgatatattgtttggtagcttgcatttacttctttagtttttttttttttttcaagcagaagacggcatacgatatcctctctggtctcgtgggctcggagatgtatataagagacagcaatgcaaattggcagtctgtggaagataagtagtggaacgaaaaagataagcagatgtgtacagtaaatcttagttgatatgaaagaaatgtatcgtgagactccatcactgatggaacttgttgtaagaaagaacaacatagagaaagcaatcaagaaagttgttaaaaataatggctctcctggaatcgatgggatgaaggttaaagagttacatgctcacttcagagaattctatccacagataaaaggaaaactgcttaacggtacgtataaaccgcaagcagttaagaaagtagccattccaaaaccgaatggcaaaaagagaattcttggaattcccgtcgcaagggatagagttatccaacaagcaatcaaacaagttatcgaaccgatgataaatcgccagttttcgaaacatagtcatgggtttagaccaaatcatagtacaggtactgcattaaaacaatgtatccaatactatgaggagggttatcacacagtcgtagactgtgacttaaaacaatgttttgacacgttgaaccatgacaaattgatgtacttgtttgaacgctttatacaagataaagctatctctaaatttatccgcaaaagtttacaaagcgggtctgcagacctgtctggcgaatacgcagaaagaaagacaggcgcccctcaaggtggggttatatctcccttgttgtgtaatatctatttgcatgagctggataaagaattagagaagcgcggacatcgttttgtgagatacgcagatgacttggtcatctttgttaaatcaaaacgtgccggacaacgtgttatggagagtatcacaaactttatcgaaaaggacctgaaattaacagtgaataaagataaaagtaaggtaggctctcccacacgtttaaagttcttgagttgtctgataacgaaaataaatggcacttgtcgtttcagacccactatggaagcaaaaagaaatttaaaagccaaattaaagtgggtcacaagaagaaatagacctggcacatttactgaaattataacagaaatcaacgcgattactagaggttggataaactattttggcagaggttttgttaaaggatttatccgcgaaatgcaagagtggttgaaccatcgaatcagacaacttattttaaagcgatggaagaaggtcaaaacaaaatacaaaatgcttcgaaaatacggattagaccacaatggtgccatgcgtattgcgaactcaagaaagaagtattggaggctttccaaaacgcatgaggttcatcatgcgcttacaacaaatagactctacaagtggggtctagtaccactagcccgactcgcagagtctgcttacgcaagatattgaaccgccgtgtacggaaccgtacgcacggtggtgtgagaggacgagtattcaattaatgattactctcctactcgattctcttattgtgtgactaatgcatcaaagtttttaagacgtctttctttttcctcatcgctgatgttgtgttttgcgacatagcgattacgttcgtgctgtgcacattctttacagcaagcacctaaataacggtgttcgttttcttctgaaactaagatttgtttattgcagtcagggtcgctgcaattgatatagcgttcgcatggtgtaccgtcgaaccattctttgccgatgactgttttttctacttggttgacatctacactgatacgttcgtcaaagacgtacattttaccgtcccataattcgccttgtgtttctggatctttaccgtaagttgcgataccgccttctaattgtgctacatcttcaaagccttctttaagcaagaagcctgagaatttttcacagcggataccgccggtacaataagtgacaatttttttgtccatgaacatgtctttgttttctttgatccaatctggcactgtctcttatacacatctgacgctgccgccgataccccttgtgtagatcccggtggtccccgtatccttaacaaaacaacatcacaatctacaccgcgtgccggtgcgtcaagtcataacagcacacatatcgagactcacgtcacccgctcgtccaagctgcgccttgctcggtatcgggttcattggcccaggcccatctcggcttcgatcagcccgcacagcgtgtgtccgatcagcaaatgggcttcctggatgcgtgcagtgacagggttggggacgatgatgctgtcgtcgcaggccgcagcgagcttgccaccatcgcggcccagcaggcccagggtgtagatgcccatcgccttggcggactcgcccgccttcaagacattggccgagttgcccgacgtcgagatgccgatcagcgcgtcccccggacgacccaggccttgcacctgacgcgcaaacacgtcatcgaagctgtagtcgttgccgatgcaggtcagcgccgaactgtcggtcgtcagcgccaggccagccaaggggcggcggtccttgatgaagcggccggtgagctcggaggccaggtgctggctgtccgccgccgagccgccgttgccgcagaacatgatcttgccgccggcgccgagcacggcggccagtcgctggccggcctgctggatatgtgcgtcagcaagtgcgtctgattcaacgtcagcaagtgcgagcgattcagcgtcagtaagtgcatctgactcagcgtcagtaagcgcatctgattcaacatcagtaagtgcgagcgattcagcgtcaacaagcgcgtctgactcagcatcagtaagtgcatctgattcaacatcagtaagtgcgagcgactcagcatcaacaagcgcatctgactcaacatcagtaagtgcatctgactcagcgtcaacaagcgcgtctgattcaacatcagtaagcgcgagcgattcaacatcagtaagcgcaagcgactcagcgtcagtaagtgcatctgattcaacatcagtaagtgcgagcgactcagcatcaacaagcgcatctgactcaacatcagtaagtgcatctgactcagcgtcagtaagtgcatctgattcaacatcagtaagtgcgagcgactcagcatcaacaagcgcatctgactcaacatcagtaagtgcatctgactcagcatcagtaagcgcatcagatagtgcgtcactaagcacaagcgtgtctgattcaaactcaatgagcgcatctgactcagcgtcagtacgcgcgtctgactcagcatcagtaagcgcatctgactcagcgccagtaagtgcaactgtctcttatacacagcgtcttatgtaacttcaaataaccttcatcagtcggcttgaactctaagaggttaccacattgttttacattaaaagcgttttttatttttaaaatttccagtatatctgcataacttacattatctatcttcttttctctccatgggcgttgtttcccacttttcgtcatatctttaagtgtttcgttatcttgattttcgtctatacatctagtagtattatattgcatataaagagacctccagtagttgtttattgagtagacgctttaatcatactactggggtttttttatgtcaaaaattcctttcaacaagaaaaatagctataatcccttacataccaaggattacagctataattttaaaatcgagttatttctatatctgtctcttatacacatctccgagcccacgagaccagagaggatctcgtatgccgtcttctgcttgaaaaaaaaaaaaataccctcctctacataactctccctcttcgaacttctacatatagctacctcaactatagaagatgtctccatcgtctcacatacccttcatgcagcattttttcacaaacacgctttgcatcctgcagctcacccagctccagaaaacaaatggccattccgaggtgaatatcggattcttcatcgtcatcgtacgatttagcttctgaaaacaagtgaagcgcctcttgatactgcttatcttttaatgctgccattcctttttcaatcagtcttgctttcagaccaggaaacaaaatgacattatctttcttcttgtcatgcttcatgcttacgttcctttcggggcgcatattttttatcagtttaccaacgaagattagtaaacacaagcaacgagaggttttcatgcaaaaaagaagccgtcacacctcgggcggacagcttctcgttgcttaagcgcgcagccagctgctgcgcttttcttcaaatgcttgaatgtcatcttctagaagtaatgttaatgaaatctcatcataaccatttaggagcatttctctccagtgagggtcgacttgaaaaggggtgatattcccttcatgatcttctatctgccgaaagaagcttatccggaacttgtttcagaactcgcaagtccctatacagctatctatgatacaaaagcagatacagacatcaaacaaacgcctgtaggtacaggtccttatgccattaaagactttaaacgtacgcagcaaatcagcttaagtcaaaataaaaattactggcatggcaagccgaaacttaagcaaatcaaagtcacattcaatgaagacggcagtgcacgtactgaccatgtattatctggcagaacagacctgactatagatgtgcctacagataaaatcaattctgtgaaaaaatcagataaagcaaaacttgaaactgcatccggctacagaacttctttcttgctttataaccatacaagcaagaaaatgacgaaagacgttcgagctgcacttgatgcagtgattgaccgtaatcaaatcactcaaaaggttgcacataattatgccaaaccagcaaatggaccattcaataccaacttagacttcattcaagatcaatccgtaccatcgcaagatattgaaaaagctaaaaaattaatggaaaaagcaggctactctgataaaaaaccattaaccttgcgtgtatcatcctattcaggacgtccagaattaacaaaaatcctgcaagtgattcaatctgatgcaaaacaagcacatatcaacatcaagatacaaaacgtagatgatatagaaggcttcttgcaaaacaaaaaagactgggatgcttcgatgtatagtttcggcacatacccacgaggagacagcggctacttctttaatatggcctacaaaaaagacggagctgtaaataaaggggcttaccataacgcacaagtagatcaattaatcgaacagttgaatcatactgtagataaaagtgaacgcgaccgtttaacaaatgaaatactgaaagtctcaaaacaagatattccgaatagttatatcacttataacgaccaaatcagcgctatgaatatcatagcgttaattaatgcactagacatcacattccactcattatcatcaaccccctcattattagtaagtgtgagagtgatttgttttgtcatctcttgagcttcccctaaatcgcctttgatgtactcatctatcactaattgaagtaaattaaaagacattgttgattccattggctgatctaaattaaatccttcccaatgataaccacgttcttctaacattggtatagcagctgaacctaactccccttttgtatcattaacaattagcgagggcttatgtgatgaacgtgtataattttctaacatcggtaatacatagatttcgcctttaccagagcgtgatgttcctacaaacatattatttaccgccgattcatctataaatgtatattcttctttgtttctaagcgattcgaaaaattgacttcttaattcggctttaacttctttaagttttgattttttatcttcttgtttaattgtttcatcttcttcaattctttgttctgctgatttaacttggtctttatagctaaaatattggtgaaaatgataggagcgaagtgtagatacaacgacaactgtcttgccaatgaaaggtgcagtacgcgtggcagagatattaagagaaacacgggaaaattttttttttttttcaagcagaagacggcatacgagatcctctctggtctcgtgggctcggagatgtgtataagagacaggtttgtcaccggcagtcaacttagagtgcccaacttaatgatggcaactaagcttaagggttgcgctcgttgcgggacttaacccaacatctcacgacacgagctgacgacaaccatgcaccacctgtcactttgtcccccgaaggggaacttctatctctagactgtctcttatacacatctccgagcccacgagaccagagaggatctcgtatgccgtcttctgcttgaaaaaaaaaaagacaaaagacacgatgtcctaccgtattctgctttcatcctgtaacttaacaccggaacataaaccaaagcgacagttcgtgcatcacatataataaaacatgcatatgttgattataactaccatcatttttattaactgttacttccgttgaacgcaaaaacccaacaagtttttacttcacttttttatatctacttaacctatcaaatgctttcgttaaatgtttcaaacttttttctaaagtatccccatctatcgcatttttcgttgacagtgttaaaaataaccaacgcgcttttggtttttctttaacaacttcttcaatcactttttgatcttgataactatttttcatagcacgcctccagttacaaactgggcagagtttcgacttacaaaaccatgtcttatgtaacttcaaataaccttcatcagtcggcttgaactctaagatgttaccacattgttttacattaagagccttttttatttttaaaatttccagtatatctgcataacttacattatctatcttctgttctctccatgggcgttgtttcccacttttcgtcatatctttaagtgtttcgttatcttgattttcgtctatacatctagtagtatcttattgcatataaagagacctcccgggctggacgcctatttccaggccgccaaagaggggcgaattacgttgcgggccgacgagagcggctacccgcccgacctgcaaaccctcgtcgccggcgcggtggacagccgcgacccccgcaaggccaaacgcatctacttcctgcgccgcctgccgcgcgaccccatggccgaccccagcctgaccgcggcccagacctggggcctgcgcagctacgacagcccccccgatgcgccggcccccggccgcgacgtgttcgacgtctactcactgtccgaaggcatcgccctcgacggcagccgctaccgggactggtgatgcgcggccccgcgcgcagcggcttcgcgctgatcgaactcagcgtcgtgatggccctcgtcgcgctgctggccagcatcgccgcgccgcgctatttcgcgtcggtcgagcgcgccaagctcaacagcctgcgcacctcgctcgtcgtcatgcgcgacgccttcgacaagttcgcggccgatcgaggccgctaccccgactcgctggagcagttggtgcaggagcgctacctgtgtgccattaacagcatcctctcagatctcgttgactttaactacaggtcatttacactacgagggaacaagatgcttggggacagaaaatgacagctgtacgggccgcctcactgtttcgtcgcccttcaaacagcgtgtcctgccctgggtcacaggcaatgcctctggccgtgagtcaggaagccgccccaggcctttcttgcacctcccttcaggaggctgctcgtgactcgccctccaggggaggaccggtgggggctcacgggtcagcgctagtcagagctgctttccccaatgaacacgttctttgtgttcaagggacagtctcctttatgtactattgttatttttggctacaccgaggcttgtgggatcttaattctccaaccacgggattgaacccagaccctcagccgtgaaagtctgaagtcctaaccgctggtgtggctcagttgctcagttgtgtccgactgtttgtgaccccatggactgtagcccacccttccataaaactcactaacggaaatgaagttaaaagtttactacaaatgttattgcttcacgcaattccagagcctgtcatttctgataagaaagcatttgatgtagctaaacgtattcttaaacttgatcctaataataatgtagcacgtaatgtgcttaaagacactgcaaaacgtatggacaacattgttgtcgatattaatgaattaaacaaacatagagatgcacgatagttaaacgtatttatctctttataatgccattagagttaccatactttaatggctatttttatacagttttctctagttttatgcattaatgtataagtctaagaggtggggttgaaaataaaaaacagtacgttataattctcactgtgaaaatctagggaggtaattttttaaatggggctgaataaagaagcaataaaaataggatttgcttatgtcggcatcgttgtaggggcaggattctcaactggtcaagaagttatgcaattctttacaccatttggtttatggtcttatatcggtgttttaatcacctaaacttttgaagatgttaatatcttcatcgcttgtagcattttcataataaactgtaccaccatcattataaaaacgtggtttatcaacagattcttgcaacgtaccgttaccatttaaataatctacgataacctcatctaagatagtaggaattttgttacctccaggagtaccaatacccatatagaagttaggacctaccactactgatggtgaaatgaatgatctcggtgctttatgaggttccccatagttaggactcgttgattctttagagaagtctcctaatgagttgttcatatagaatccttctttcatgaaatcaccagatccaaagtaacttgaaagtgtattagtcgtgcttgctaatttaccatctttatcaataactacaaagtgcgttgtacttgtattatcagttcttatttggttaaagtcactaccattttctgtgttacttccaacattaactttatttaattgaccaagtaagtaatcatccgataattgttggtcgttacttgcttctgaactgtatttgacggagagatggtgagttgttcgtggtgcatggctggtagtgtgtgagatgctaagctgagggggtattgtgacaaaaggaattttaacagctatggaagtggagtgaattggcattttttttttttttttttcaagcagaagacggcatacgagatcctctctggtctcgtgggctcggagatgtgtataagagacaggttgtactttctttacttgccttctcttctgttgaaggttgttctgttgtgctttctttacttgccttctcttctgctgaaggttgttctgttgtaccttcacttgttgctttttcttctgttgaaggctgttctgttgtgctttctttacttgccttctcttctgttgaaggttgttctgttgtactttctttacttgccttctcttctgttgctgtctcttatacacatctccgagcccacgagaccagagaggatctcgtatgccgtcttctgcttgaaaaaaaaaaaaaaaattatatggtctgtttacatacaatcgtacaacctgcagctaaagcaggtgccattttacgagtaatcattgcggcagggaagttccaaggtgtaatcgcaccgacaactccgacagggaaagattgaacaatgatcttttttgaagcggcatttgctggaatagtacgtccatatagacgttttgcttcttctgcataccaatcaacgtaggaacgtgcataatcaacttcccctagagcttcttttaaagggttgccgccttcttttgtattcagttcagcgagttcctctttatgttcatcaattaattttgaccaagcccataatttctcagaacgtgtatgggcatctacttcacgccaagatagaaaggcatcatgtgctttttctatttgcttattcattgtagcttcatccgtatactcaagtgtttcaatcacttcattcgttgctgggttcaaaacttctaattttgtcattttctaccaccttatttttccttttttgtacataactataaaatgtacctaatcgttgagtagattgtttctttgcatattgaattggaattttacgcttagcttcaagtacgaatatagcaccaaccgttagtaagattaatgctacgattaagccagcaatttttaaccatgctagtgaagtatcatcttgaccaacaaataaagattggccaaattgttctatactagatggcaatgtagataaaatcccagcaaagatgataagagaaataccattaccaacaccaaactgagtgatttggtcaccaagccaaattaagaaagctgttcctgcttttaaaaccactgcaatcaataaataactcattattgatttatccataatcaatttgccaccaagataattgttaaattggaaagccatgcctattgattggataaaagctagaataatagcgaaataacgtgttacattattaatttttcttcgacccatttcaccttgcttagcccattcagagaacttaggcacaatatccatttgcaataattgcattacaatggatgcggtgatatgcactatgatgtggtgcttgtttgatgttgtttttttttttttgttaatgatacggcgacaaccgagatctacacaaggagtatcgtcggcagcgtcagatgtgtataagagacagttgaaggtacttggaaatattttattaaaaaatataaagaatctaaaaaagtgattggtaataatgggttaatgaatcgtgttcctagcggtttggttgatgtacgtgattttgttcttagatattgcaataaagtttatcttgattttggttttgatactgaatggtatcatgaatctgtctcttatacacatctccgagcccacgagaccagagaggatctcgtatgccgtcttctgcttgaaaaaaaaagactaattccgtgccagccgcctcgttgatcccgacgcagcgagcgtgatctggatttacttgttttcaatggcgcgtaggcgggctgttacgtcagcggtcacatgccacggcctcaccgtggccctccgtcgaacctttttgttagaacatggctttaatgggttggtgggtgataatgctgcaccttccagcggcaacttttggtgcagcaaccttacagatattcgacaggacttgcgcgataaaggctacaacgtacatgaagctaatgtcggggcagactgctgcaactatgaccgtgcagttgaaccttaatactatatgaaaggcggcagagtcgactaaggtgctgaacattctcagaaatgcggtcatgaacgttacggaaagacttatgaaggggtttatccccaatggcagcctggtcaaaaggtacatttagtcggtcatagtatgggcggtcaaacaattcgccaaatggaagagttcttacgaaacggcaaccaagaagaaatcgattatcaccagcagcatggcggtacgatttcaccgttattcgaaggcgggaaaggcaatatggtgagctcaatttatacagtggcttcaccgcataatgggacacatgcggctgaccttctaggcaagcgacacatcacgatagaagctaaaggcgaacattataaagcaatgaaggaggcgttagaacaatgaaattattattgatagatacgtccaatcagcctttgtctgttgcattaacagatggcaatgatgtgctagctgaaattaccaacaattcaaagacgaatcattcagtgcaactaatgcctatgattgaacgtttatttaatgaaagtaatatgtcaaaaaatgatcttgatggcatcgtagttgctgaaggtcctggttcatatactggattaagaattggtgtgacgactgctaaaacgctggcctatgcattaaattgtaaattatatggtgtttcttcattaaaagctttggcagcaactattagtgagaataacaaacttttagtacccatttttgacgcaagacgtgaagcggtatatgcagggatatatcaacaaaaaaatggactattagaaactgtattagatgatcagtatatttcaatcaacgacttgaaacagaaattacatgaacttaatcagccctatgtatatatcggtgaagatacagttaaattagcacatttaatagatgctgaggggattaatcaattaccacaagcgtcagtgatgagtaatttaattaccgagcccacgagactaggcatgatctcgtatgccgtcttctgcttgaaaaaaaaaaaaataagaactattgataaaactacacctataactgaccctgtctcttatactcacttccctacccccagcaccccatggccattcggaaagtgcatgatcaatgacgtgatcagtgcatgatcagccacgggatcggtgcatgatcagtcacgtgatcagtacatgatcagtcacgtgaacagtgcatgatcatttacgtgatctgtgcatgatcagtcacgtgaccagtatatggtagctacgtgatcattccatgacgagccacgtgagcagtgcatgatagaaacgtgatgtgtgcatgatgagttacgtgagcagagtatgatcagccacgtgatcagtgcatgagtgccacgtgatcagtgcatgttatgtcacgtgacaggtgtgtgatcagccacgtgaacagtgcatgttcagccacgtgatcagtgcatgatagccacgtgatcagtgcatgatcagttacgtgagcagtgtatgatcagccacgtgatcagtgcatggtcagacacgtgaacagtgtatgatcagccacgtgatcagtgcatgaccaggcacgtgatcagtgtatgtccagccaagtgatcagtgcattatagccacgtcatcagtgcatgatcagtcacatgatcagtgcatgatcagtcacgtgataggtgtgtgatcatccacgtgaacagtgcatgctaaattcaatgcacaaagtatcgaagaagtgttcttaaaagcagaggaggcgaaagggcatgagatttaaagcgatattaaaacgtgttattacagacttaatccgtgataaaagaacattggcactgatgtttcttgtccctttagtcatccttacgattatgttcttcttgtttaacagcgataatgaagaacaattagaaatcggttttgcgaaagacgtaccgcattcgcttgttaatgctttgcctgatgataaagcacatacacatacgtaccaaaagaccaacaaggtacaagatgtaatcgaacaacatcatttagatgcttatgtggagaagaaaggtgaccagctagtagttacttataccaacgaaaatccaagtaaaacgtcggctgtaaaacaattactcgcaagtgcgcttcaaaaagagaaaatgcagacagtcgaacatcaaatgaaatctatccaaacaaaaatgtctcaaatgcctgagacaagcctaaacaatcaacagcacctgtctcttatacccatctccgagcgcacgagtccagagaggatccttttaaataataattttgtttttcaaaattccaaattgccgtaattgattgtgctttttcttcttcgtctgttgttatatcttcgtcacttgtattaatcaaattgccatcttcggcatcatctaaatttaaaatcttatgtttttgtttaagcaaaccaccataactcaacatacgttttcgatataaacctttttctaaatcattcacgatttcttgatttctttcatcatcatcagttaaaaaatcagatgacttaaccgaatatttagaggtttctttgatagctgcttgaatatctttatcgcctttttgatttggtttgatcgctttaatatttgctacgggtcgataatttacttgtaatgctttttgccataaattaaccctgtctcttatacacatctgacgctgccgacgatactccttgtgtagatctcggtggtcgccgtatcattaaaaaaaaaaagtttgacgctattcgcccattccacacaccctcaacaggtacacctcacagcctttaacagcagcattgaagcaatcttcaaagatgccttcgatgtcatgttgtgataaagcatctaaaccagcttgtgttgttccgcctttagatgtcacgttttgtcttaattgctccatacttaaatcagaacgttctatcattttacctgtgccgataattaaattacggatagattcttcaacttcttctttatctaatccaagcttgacacccgcttcaacatactgttcaaccacatgatacaagaacgctggtccgcttccagtcactgctgtcacttgatgcagcgcatcttcttgtacttctatttctgaaccgaatgcatgcacaatatcaatcacttgctgacgatcttctgaagcataattatcagagaaactgatacctgttacagaatgaccgacttgtgcattcgtattcggcataatacgtgcaatcggattatcatgttctagttgttttctgatatactgaatcgagatacccgccataattgaaatgaacttattctcgtctgcaatatatggacggattctatctgctaaggcatcaaaatcatagggcttagttcctaaaaatacaaagtcagcatccgcaagtaaagatgcgtcatcataactatagttaacgcctaattcatcagcataaccttttaacacttcttcgtttgaacggtttgtgatatagatattatttggatcaattacttttgatgcaatgattcctgagaaaatggcatgcgccatgttgcctgaacaataaaatacaattttcatattttgactagcactccctatatttttgataattgatataccaatcatagcaatattgcggtggtgttggtagggcagagtagagaaggtgaatgagagagattataaatatcgaaacggtggtaggagcgaggtagatcgatatgtgggtgagtgaaatgaaggaacgagtcaatatgagtttcgttattgaggttttatttttaatgaaaaggcgacaaccaatttatccccatggcgtatcgtcggcagcgtcatatgtgtataagagacggcccgggccacggtaggggaatctggcctcgagacgtgttgaaggaggtctctcgagggctttcccgggttgaggcaggaaacctgtcgcttatacacatctccgagcgcacgagaccagagaggatctcgtatgccgtcttctgcttgaaaaaaaaataagactagcttctgtcacgtatgttcgacgattaaagcaagcatacatgcattcggattatcgtgaatgcttacatatatcaagcactaagcagacacgccttttatcttcttcacacttcccacaccacacattacacactaatggtgttgtgtgagttcgacgccatactttttagcaaggaagtttaaaccgtgtttaccgtattcagtgttaatcgtacgtgaaagttctaatgtatcgatgacaccgttagtagacggcccaaaaccaaagcgctcataaccagtatcaataaatcccatatcaaatgaggcattgtgagctacaaatatcgcgtctccaacccattctttaaattcagttagcacttcttcaatttcaagagcatccgttagcatgtcgtctgtgatatgagttaaattaatgattgtttcagataaacgttcatgaggattactaaagcgttcgaatttatcaataattgcaccattatgatcttttacagctgctaactcaataattttatcgtattgattagataaacctgttgtttcaacgtcaaataccacataagtagcatcttttaaaacgcggtcagtaggtttgtaagcgataggtactccgtcatcaacaagcatgccctccatacgcttattggtataaccgaaaagcaagtcaagcaggtgcgatgaaatccttcttaattaccgttttcggcggtatgttcatgctggtcggttttattttaatgttcaacattacagggacaaatacgatttcggaacttgttcaaattccgatgcgtcaaatgttatatcagtctccttggttccccttagcagtcatttgtatcttaatcggtgcatttactaaatctgctcagtttccgttccatatttggctgccggatgcgatggaagcaccgacacctgtcagtgcctatctgcattccgcaacgatggtaaaagccggctgatacctgctttttcgttttacacctattttaggatatgaatcatgggttgcttatattgtgattaccagcggtagtacgactttgctggtcggttcttttgtagccgtcggccaaagagacaaaaaaggtttgttagcgtattctactatcagtcaactcggcatgattatgtcgatcgtcgaattcggaatgctggcatacggttatcatgcacaaaccttccaagctttctatgtaggagccaagttttaattcagatatcgctccaattggtttaactactaaaggtgcaataagtaagaatacgagtcgtgtagctaatgaagatgtgattcgacaatttattcagcacaataagaagaatttcattgaaacagctactcatattatggatggtcatacagaggtagcgcctataaaatacaaaaatactttaccatgtcaattttgtagttatcagtcggtatgccatgtggatagtatgatagatagtaaacgttatagaacagtagatgagtctattaaacctatagaattaattcaaaatatgattgatgaaggtggtgaccagtgatgataccaactaaacctaatgatgtaatttggactgacgcacagtggcgtagtatatatgctaaaggtcaagatgtcctcgtcgctgctgccgctggttcgggtaaaactgctgtattagttgaacgtattattcaacgaattcttcgagataatatggatgttgatcttttactagttgtaacgtttacaaatttgagtgcgcgtgaaatgaagcttcgtgtagttgtaacgatcatgacagataatagagaaatatatgtgccgtcgtcggacacggcagagtggtataagagagaggttgaaaacctatatttctattttttttttttttaatgatgcgacgaccaccgagatctacacaatgggtatcgtcggcagcgtcagatgtgtataagagacagatcagtaagcgcgagcgattcagcatcagtaagcgcaagcgactcagcgtcagtaagtgcatctgattcatcatcagtaagcgcgagcgattcaacatcagtaagcgcaagcgactcagcgtcagtaagtgcatctgattcaacatcagtaagtgcgagcgactcagcatcagcaagcgcatctgactcaacctcagtaagcgcatgcgactcagcgtcaacaagcgcgtctgactcaacatcagcaagcgcatctgacacagcatcaacaagcgcaaaagactcaacatcaacaagtgcgactgcctcaacctcagaaatcgcagccgactacacgtcagcaccttcacccgccccaaactcagccacgtcgcgctcaccagcttcaacgcagacactgcacaccacatcaccatcgtacgcaatggtatgagtccaaaacttctcatgaacatagcgattacattttatattattgcagcattattaggtatctttttagctatacaaagttcattctggattattccagtcggtatcgtttgtatggcaattggttatctttatactggtggacctattcctatttcatggacaccatttggcgaactattttccggtttatttatgggaatgattattatagtgttatcattctttattcaaactggaaatgttcaaggttatgccttgtggattagtattccaatcgttattacatttggacttattaatatggcaaacaatatccgtgatcgtgttaaagataaagaaagcggcagaaaaactttacctattttattaggtaaacgtgcctctgtgattttcatggcagccatgtatatagttgcttatgtgttcgtaattttcacagcactattcaaagctccaggatcactattttacttattagtgttattatctttccctatgccaattaaagctgtaagacgtttcaataagaacgatacgccagctactatgatgccagctatggcagctacaggtaagaccaacacaatatttggtcttttatatgcattaggagtattagtacccgtagttagtggagcgataggtttaatgacactcccatatgttcaaatcattactaaatctattggtagactcattaatggctttacagaattaaacccattattaatgtctatccttatatgtgtgacattttctttattgatggttacacctatttccctcgtagcgatagctactgctataagtttaactggtttaggtagtggtgctgcaaatatgggtattgtagcagcatgtgtaacgtttttatttggatcactaagagtcaattcaatcggtgtcaatttggtcctattaattggtgcagctaaaatgatgatacctgtctatttgaagaacttaattattgctattcccttaacactaaatgggattatttgtggtatagtagcgtatcttttaaatattaaggggacaccattgtcagctggttttggttatacaggtctagttggaccgattaatgcgcttaatcgaatgtctggtgatttccagaccctcgtgttcacggttgagcaaggttactgtatcgccgacatgaaatgtttcatcttcaggtaattcaaccatcatctgatccatgcagactctgccgataatcgtgcaatgatgccctttgatttcaactgtcgcaccttgcatcatacgcggaaagccatctgcatagcctacacctaatacagctgatttcactttatgatccgctgtataagtagaaccgtagctgactgtgtcaccgacattcagttgtttgacttccataatttcagtctgccattgtgcacatggataaagtaccgcatgtgtcttttctcttacatattcagatggatagtaaccatataatgcaataccggtacgcaccatgttgcaaatcggtgcttcatgcaaaatagtacctgcagaattttgcgcatgtacataaggcgcatgcggtaaagtatttacccattcttcaaacatttgatattgctctgcagtatgcggactatcttcatcagcttgagcaaagtgtgtaaacacaccttcaaagatcagatgttcatgctgctcaatctctttaacaatcttttgataatcttctgctgacttaataccgtcgaatatactgtaagcagtacagggaaaaaaggtttcggtgaaattttaaaaatctctgaattgccgacaaactatgaagaacaattaaacagcggcggtatgagcggcgcagcagccgcccaaggcggagactcatcagaagaaggtatggatacagcacaagcatcaaatccagttgtgaatgatatttccggcaaaggagatgcaagtgatgcatctaaatatacggtgctcatcggacaattgtcatcaccggtacgtccagggttatctttagatgcagctgttacgacagataaagtgaaactgccgtctaatgtattaggcaaagataatactgtttatgtgctgaataaagataataaagttgagaagcggaaagtgaaaattgaaaaacaaaatggcgatatttatgtgaagtcaggtgtcaaaactggagaacgtctagtgaagcacccgaaagcatctctgaaaaatggtgatgcaatagaggtgaaacaatgattaagctggataagattaatcgttgaccgtgaaaaatacggcatgagctttaaccaaaaattagaaacaggcggcgtattaatcggtaaagatgttaaattcgaagcagacgtagaatttatcgttgaagactaattaattatagatatactggaatgcagcaagggctgtattccagtttttttatgttttgtttttattacgggaatgattggcaaattgactgggaatatatacataatagaagtatccactttaacagacaaaggagtcatgaatcatgacagtaacgagaaaaggtaatcaaatcatcggtacacgtacatttgaagcaagtattcaaaatgtattcaatgcctatacaactaaagaaaagtttgaacaatggttctttcctaaaggcggatcattgaaagtatatgaatttaatccaaaaccaggcggaaagaatttctttaaaattcaaatgcctgatgcagaaagctacaccgttcagcaatatgatgaaattgaagcaccgcataaaattatctatcatgactattttgcggatgaaaaaggcaatatcaatccggatatgaatggaatgcgtgtggaactggtctcatgggttcagagctgggtataagagacaggcatgcacttgtttcaatgactcactgtctagttcagttagagattcattggcatctaaagccagttctggttgaaaaggcaatgcttggagctgctttaaggcctctaaaacatgttgcgaccatttcaatttaatccgtttctgctgtgttgataaaagctactgataattatcttcagataatccgctgattgttgccccgtaagcaacatcaaaagcaggcagtatatgaaaagcttggaataacgccatcgctgctgtacttcttgcagtcggtgccgcatccagcgcatttaaataatccgctgcttcttcaaaatcagtaacatcttgtccttttaaatgatgataaaaccaatctttaattgatgtgtatacactttcgatggtttctttatcataccaatctgtctcaaacgcatttgcttcaccaaaataagatgtacctgcttcattgactaattctataaccagcacttttctgctgttcaaattcactttaggtgtcttaatcgggtgtttaaaaggtgcctcgtaggaataaaagcgaatagtatggaatctcatcatttaatcctcgatttttcctctttttaatttacctgtagatcctttagcagctgcagtgtcaattgcggcattggatgtattagttgatgaagatttagcgggacgttcacaagagttaggcgaatatttccaagaagaattgagaaaaatcgatcatcctgcgattgaagaagtacgcggacgcggattgttcatcggtttacaattaaatgaaagtgcacgcccatatgctgaagcgttaaaagaagaaggcttactatgtaaagaaacgcatgatacagtgattcgttttgcgcctccgctggttatttctaaagaagaaatcgatgacgcattagaaagaatcaagaaggtattcagctaagttcaaaaagttgtaacaaaaggattgaaaacactttaaaacggttgcgcttatgttacaatacaaatgaaagcgaaatcattgttagtaaaaagaggcgagaaggattatgactgagaacaataatttagtgacatcgacacaacaaattattaaagaagcattgcataaattaggttttgatgacttgctggtgtgtcatgcctatcatgcctcttttctgatatgtatattacaaaatctccgaaaacatagtgttttcgaagattgaccattactagagtgcattaaatatttctgaagacatctggaacaggtatgattttctgttcttccaaattgaaaaagccgccgtattgcttgcctttgcaatgtactttatcacctgaactgatttcaaactcaaagacccctttcattcggctgatttttgttaaccagcatctgccgaccgggcaatcatgaattgtgactgctattttataatctgcttcagtatgcatcaaaatcggagaaatcgattgtttcatcatttcagaataattcatatgctgattaatagataacgttcttaaatcttcaaaccatcggatctatacaatgttcctgacaatgcccattgcatctatgtcatagccgttgactactatttcacttactgcgactaatttacgctcattcattactgacaactcctatctcgaaacttacgttatcagtataacaagcccatataggaccccaatgttttaaaggcgccgtagatcaaatcgtttctgtcggcaaagccgatcgtatcgtttttcccgttttgatcaggatctttttctgtaaatgccttcgctgtttcgtaaagttcatcaactgtcttcggcatatcgagtccaaggttgtcaagccagtctttacggatgacgatcccctgtcttgataatgggcgctccctggtgatgccataaagctttccgtcgattgaagcgtttttattgatcagcttgttcatcttgcttaaattcggataatcctttaaataaggtccgacttcccaaaacatccccgatctgaatgcattcatgacagatgaatttttaatgtcctgaatggtgacgactttcggcaggtttccggcggcgagcgctgagtttaaacggtcctcttttaccgcatcaggcacccacattaaatcgagcttagtattggtgagttcctcgatttttttaatcgccgtgtccttcggcggctgctgatggtaaaggagtttctgatcgcgacatccatgcaatcattcaaggatctgagcatgagcaacgagcgatttatcaattagaaaatttacaactgcaatatgtatctaaagggctacaaagtgctgaggtcgtgcttaaagataaaaatggaaaaacttatcaagattcaagtcttggaacaggttcaatcgtatctatatataatgctgttgatcgtattttccaaagaaagacagaacttatcgattataggattgactcaatcactgaaggtgcagatgcgcaagcagaagttcacgttagtttaatcatcgaaggtacaccagtcaacggtataggaattgatcatgatattttacaggcttcttgtaaagcctatatagaagctcatgcgaaatatatttctgaaacacaaaagaaagaaggtattcattcatgatttacaaaatcgtagctttacctggcgatggtataggaccagaaattataaagggtacattagagcttctcgaactaatcagtcataaatatgacttccagtatcaaatagaacgcttttatcatcattctcgtcatatcatttctgctcaatttttcaattgcttatatctatgaaatgaatcgtttaactgatttaaacccaattattaatttattgaaaaatctcatagaatcgataatagaaacattggcattcatttacttcttcattgcgtttatacatatacttaccgttattccgtttttaaaaattattgacacttctactttggcaataggcgaaatgatattaatttgttatgcggtttacagtgttttcaacattccatcaataatgattatgtacgcacctactatgcttagccgtatatttaatctgcttggacaaatcattatcggaggattgatttactacttattgctgataattatgccgctgcatattccatttaatacgcctttaatcatcggtgcttttgtcttaacacttgttggaaatcttattatttggagtgccgcagtcgctgaagctgaaaaagaaaaacgtgaaaaacaagcgaaagccagcaaggaataaacagctgtctttcttctctttaatcgcatcactttctatgcgacagttacgtatgtgtatgcatgttgtttcgtataaatgaggaggcgagcaccgagatctacactaggggtatcgtcggcagcgtcagatgtgtataagagacagtactgatgttgaatcagatgcacttactgacgctgagtcagatgcacttactgatgttgagtcagatgcgcttgttgatgctgagtcgctcgcacttactgatgttgaatcagatgcacttactgacgctgagtcgcttgcgcttactgatgttgaatcgctcgcgcttactgatgttgaatcagatgcacttactgacgctgagtcgcttgcgcttactgatgttgaatcgctcgcgcttactgatgttgaatcagacgcgcatgttgacgctgagtcagatgcacttactgatgttgaatcagacgcgcttgttgacgctgagtcgcttgcgcttactgacgctgagtcagatgcggttactgattctgagtcgctcgcccttactcatgttgagtcggatgcacttaccgatgctgagtcgcctgcctctacttatgtcgcatcagccacacttcctccggcacactcagcctctctaccatacactgtgcccaccacccttttcttctatctaatatacttttgactacttcaggaatgatgtcgccagcctttttgactactacactatcaccgattcgtatacctctttcatgtataaggtcctcattatgtaaagacgctcaagatacagttgtgcctgcaactctaaccggttcaagaatagctcttggagtcactacaccagttctcccaatgcttagctcaatacctaataattttgaaacaacttcttcagctggaaacttataagcacttgcccatcttggcgatttctgcgtataacccatttcttcttgttggtctacatcatttacttttataacgataccgtcaatatcgtatgatagagactctcttttctccgtccatttatcaatataatcaagaacgccatcaatatcagctacacgttctctttcttgatttgttttaaaacctaagtcatcaagtccttgcaatgcctgactttgagtcgttgcatcaaaatcagttaaatcatttacgctgtataagaagacacttaactttcttttggctgcaagtttagagtcaagctgtcttaaagatttttcactttgttgtcccttaaagttttggtgcggttcaatcattttaccgttttattttttgttaatgttgtccggtaaattggttaccttccttacctttgcttcttaaggaacctaattcattcaatttacgacttgattggttctatttattacaatttggtggtaatggttctttggcaagggctggtgtatttttacaactactttttaattcttaatggttttttccatccgatcctcagcatcatccctattttgattagcttctgattttagtgttgctagatcatgttctatttgattttgacgctctttgttatcagattgatttgaagcctttttatcactttgactcgtactagaactttcattagagcggagagaatccacatcatctttgatagagtctaatttcttgaaaatggtcgtatcattagcctgtgctttagtatcattgtctttagcttctgtattctgtgtatcttctttatgaatagcgtctatattgggatggtcttcatttacaccattgtttggttgatagttatcaacattattagaaatggcatccaaatcttctaaaaattgatctaactccttagacgcttttgaatcgttgttactatcattagagacgtacaactaaaccgcatctcttccaatacagtattaaaatggcaggacctgcacttaaaccgtatgccaataaagacggctgggtagaaaaaggtccgaaaccattacatgcttggacacaatccagagatttcccaacacctgaaaaagaacgtttcagccactggatgaaagcacacttgaaagagaaagaaggggaaaacaaatgactggattaatttctaacaaagaaaagttcttagcaaacattcaaaatgctttagacgcaaaacaccggcaaacgtagttaaacctgaatggtcagtacaaccgcaatataaaactttggctgacttaacacctgatgaacttgtggatcatttagaacatgaatgcgaacgcatccatactgtgttcaaaaaaactacaaaagctaacttaaatgagattttaagagctactatcaaacaattcggcggcaaccctgttgtcagatttgatgatccgcgctttactgaatatatgtctagatgttcaaccaacttgatattgatagatcgtctatttcaaaagcattggtatcttatctgtttgcataaagagtatttaagtttatgattaagctagaggttttagtacactgcaattttaggtatgagtgattcagataattaaatttacagaagatatgagctgttttagtacactgcaattttaagtaaatagtattatactgtttgttggcagcttcggctgctttttttaatgtcttatcaagtttgtatagatactgtaaaacgggtttattctgaaggttgtatcggttactttagaagtgtgtcattatcattatttttagggtaggaggcttatcatgaaaagattgagtatgatcggtacggcattagtagcaagtgcattaatcttcagcggtattgaagatgtggcagatggtgcagaagcttatgcggcaaaagcggtgacaggtgaagagttgccggattcgactgatccagatggcgatggatgggcaaatgttggttttgaaaatctgcagttagatgacacctgtacagcctttaactaagcgatctacttcagcaccgcgtttatgaataccttggtcatttaaatatcctttaacataaccgaaagctgtttattcagccaccgtaccgattgtacctgcacggaatactttatcctcaccaaacagcactttcgtatagttatgggcctctggctgatattccccgctgaagttcaagtcgatatcaggtactttgtcccctttaaatcctaagaacgtttcgaacggaatatcttggccttccttaatcatttcagcgccgcattcgcattttttatccggcaagtcgaatccagaaccgacagacccgtcattaaagaattcgctttttttacacttaggacaaatataatgcggcggtaatggatttacttctgtaatctcagtcatcgtcgcaacgaaactagaacctacagaaccacgagaacctactaagtagccgtcattcaaggatttcttaaccagacgctgcgaaatcagatagataacagagaatccgttaccgatgatacgatgaagactttgaagacgatgacttcgaggaagaagattttgaagaagaattagaagaagaggacgaagaggaaagttacgaagcgttagtagaagaaaatttacagcttaaagaagcaatcagccgactagaagaacgctttgaagacttgccttaggacaaaatcaggaaagtcgaggggtatgtagtatgactaaaccagttaaagatcaagtagatacagttaaaaaagctaaaaaattcaaggatgttgcggagaatcctgtatatagaaccgttgcaggcggatttgtcggtgcaggtatcggctatgctttaaaaccgaaattagcaacaaaagcagttgctaaaaaatatccgaaaaagaaattaaaagatgcaacatcattcaaaggcagagcttcaagccttacagattcattattcaaaaatgacagcaagaaaaagaaaaacaagaagaagaacaaaaagaaatccggcttattcagcaaagatgctaagaagaaagataaacgcgacaagcgtgataaaaaagctaagaaaaagccgaataaaaagcaatatcaatcattaaaatctgaaaatgaatcattgcagcagcgtttacagttcttagaagataagttcgatcaatatgcagcttctaagagccacgatatgagtgggatcgtcacactcgaagagtttttagaggtatgttgcctaggcttatgcacagatcttgaatgaggagcagtatgtacaagcgggactcacagcagatatattgatattgtcaaattgaggaactacgctcggcatggtattcacccccaagtgcgtggcgaagtatggctgtatctactgggcgtgctttcagccgacaaaagtatgtctttttgtgctcacaggaaggccaggagatgaccacagtgcgtaacaagtttctcgagtatgaaggtgtgagtaagcgaatcccgtcaatcgagaaggacgtgcgcatagaagtactccgttactttcggcatcgcatgaatcccacccaacagcgacacaaacaggatgcaaactctatcattcgatcttcccggtctatcgataattttcccgaatacagccatgagattggacagacgaccgcggaatccggtgtaggtgggccccatataccgcgcattctgccttcgacacagtatggactatgattgaaatagccatgaaaaaagatgtggattatctcaataaaactgatgaaattgttcaaatcgtccgaccgtattttaaaatcagccagtaatcgaaaaaaacaccttgaaccgctacaattcaaggtgttttcaatcagcttatttctttattaatcgtattggcttaaggtaagtaccaagtttccaaatatattctaaaggcccaagtgtgaagtacttcagccaaaccacactgaagacaatttggatgcaataaatcatgaggcataaaatcaatgtgtgtattaagtgaataccttggctgaagaacaaatgccctgctgcataaaggaataaagtctgtccaatataattcgttaatgccatccgtccataatacttaagcgggcttaagagttttctgccttttcgggtgttcagtacagtcaggaggaatagtacatagaatcccgtcaataaaggagaagtcgcgacaatcgcatggtggaatgcattccataattctggatactgttgcaattgtgctggattcaggttcgtatgcttaggagggtgttggtagtgatctgcgtgtgtcgagcatatggatgtgtgctggctaagagagtgatctctccactagttgcataattgtggtatggtgattgtttggtttgatttcagcacgagggcaccaagttagtcgtcggggttttttatgtaaaggatacggcgaccaccgagaactacacaaggagtatcgtcggcagcgtcagatgtgtataagagacagcacttactgatgttgaatcagatgcacttactgacgctgagtcagatgcacttactgatgttgagtcagatgcgctttctgatgctgagtcgctcgcacttactgatgttgagtcagatgcgcttgttgatgctgagtcgctcgcacttactgctgtctcttagacacatcttacgctgccgacgccactcctgctgacgccttccgtgttcaccacgctactgttcactgcgtccccatctgttcgatccgatagtttagccaccaagcagtattttcgatcatttccaagcaatgccgattcaaatttacaactgggcaaaattaccgcaataagaattccagcacgttgcatcagcaggtatcatcgtattacttgtattgcttctagcaatgaacggattagctatcttcttaagaaataaattcagtaaaaaatattaagtcaacacttataaagctcacgaatatttttagcaaaggagttttgaaacatggataaagttcaagacaaaaaacaaggacaagacaaggcagaacttagcaaagagttgcaaggacatgaaaatgacaaccatattagtgtctcagcaaatgttaagccgcacgattcaggtgttgttcagcaatctaaagaaatcgtgtactctacacaaaatttagatttatggtatggcgacaaccacgcattaaaaaatatcaacttagatattttagaacacaatgtaactgcaattatcggaccttcaggttgcggtaaatctacttacattaaaacattaaacagaatggttgaacttgtaccggttgtaaaaactgctggtaaaatcctttaccgcggcaacgatattttcagcagcaaacaatctgttgaaaaattacgtactaacgtaggtatggtgttccaacctctatatgatggattaaatacagtattaggtagagaacaaactgagagattcatcgagagaggtattattgagattgcgccacttgcttatatgagaggtagaacattagatgatgcgtttgttattttagatgaagctcaaaacacaacgcacgcacaaatgaaaatgttcctaactcgtttaggttttggttcaaaaatggtagttacaggtgaccaaactcaaatcgacctaccaaaaggtgtaaaaagtggcttaaaagaagcaagtaagaaattatatggggtcaatgaaattagtattatgaaattagatcaaagtgacgttgtaagacatccacttgtaagtaaaattatagatcgttatgaaggagttgagtaaatgtttacaattgactttagtgaccataccgatttagtaaagaatgaatggtatgaacaaatagattcattacttacctttgctaaaaaacaagaacatattgatagtgaggctgaactttcagtaacatttgtagataaagatgaaattcaaaatatcaataaaatgtatagagataaagatattcaaacgttcaatggcatctgttaattggatttctccgccgctgcctttatcttgtgtagacagataaacaaagatttccggtgttaaaacataacggcccataatcgcaagattagaaggtgctgtacctggtgctggtttttccacaaatttttctacttcgtataaacgtccgttttgtttttcaggttttacaataccataacggtgtgtatctttctctggaacagtctgtacaccgataacagatttgcctgtttcatcatagacattcattaattgtttgatggctggggtttctgattctacaatgtcatcccctaataaaaccgcaaacggttcgttgccgatgaattggcgcgctgtccaaatcgcatggcctaagcctttttgttcacgctgacggacatagaagacattggctaagtgcgttgaatgctgcaccttttctaacaagtccatcttacctttttctctcagattattttcaagttctacttgattatcaaagtgatcctcaatggcacgtttatgtttgcctgtaacaataataatatcttcaatgccggcacgataggcttcttctacaatgtattgaattgtcggtttatcaagtatcggcaacatttctttcggcattgcttttgtcgcaggtaagaaacgtgtacctaaactgactgacagtgatgtaccagtatgtagactaggaaaaaatgaaatttaactagctagtacggggtaagttccactgtaatattttgaatattttgttaagtttaagaaggttaagacggtcatgtgaggccgtggggaaacaaatacgttgccatattgtggttttttttttcaagcagaagacggcatacgagatcctctctggtctcgtgggctcggagatgtgtataagagacagattcaacatcagtaagcgcaagcgactcagcgtcagtaagtgcatctgattcaacatcagtaagtgcgagcgactcagcatcaacaagcgcatctgactcaacatcagtaagtgcatctgactcagcgtcagtaagcgcgtctgactcagcatcagtaagcgcatcagatctgtctcttatacacatctgacgctgccgacgatactccttgtgtagatctcgtgggccgccgtatcattaaaaacaacaactaacgctaagacaataacaatgaacacttactgagtacttaccacatgtcagatatcatacaaagtgctttacatattcatttactctttataagatacatgtgatataggtactgtttgccttattttactgttggagaaattgaggtacagtcaatgagtgctcaggaaagaaacattcccaaggtcacataagataaatggtagagctgggacatgacctcagacagcccgacaccagaccctgtgcctatcaccgttaggctgttggatgtgcatattgtagttctgcaagttgatcatgacaaaggttaggttgatgtggcttcagggggaaggtggcatcagaaagaggtaaatgaagtggatgtgggtaggctggagtaagaggagatgagtggacatccaaggcatggaggaaagccatgatcaaagccgtatgtgtgggaacgaggatgtggagtgagccattcatgcggcccattagtctgctcagtggcctggtgcttcttggcaaagcccaaatgaacatctcattgatggccccagaaggtgtgggatgaaaatacgaatgttacacttgcaaaccttgaataagttaaaatctataaattagtaagaatgcacattggcattggattgataaggaatattgagactgaaaaagtcatttaaataacgtccgataccgtcattgttattagagtatgtgacttcgtttgcgatatatttcagctcgttcaagccgttttccatcgcaataccgtgtttggcatacttaatcatttcagtatcgttatcttcatcaccgaaagcgataatgtggttacggtcgacaccgagtacttctgtcacactagcaatacctcttgctttgcttataccccgttttacaatgtcgataacagggaaaggtgcgccccggcggcggtgttcgatactttcagcatagaagcgtgataacatttgttttactcttggaatcatatgttcatcagcttcaatcaagattgaagtcggtgcttcattcagctggctgacaatgtcgcctgtttcgattgtcggattccccatcgagaaaccttcaaataggtgttcatcataagtatcgatatacacatgatcttttactatggtcagtcggtgcgttaagtggtgtgcgttgagaatggtaggttctcggtgtgatgtgagggactgtgtcagtattaatgatgtgtcaatgtaggtatggtacatttttttttttttaatgatacggcgaccaccgagatctacacaaggagtatcgtcggcagcgtcagatgtgtataagagacagcattgttttacattaaaagccttttttatttttaaaatttccagtatatctgcataacttacattatctatcttcttttctctccatgggcgttgtttcccacttttcgtcatatctttaagtgtttcgttatcttgattttcgtctatacatctagtagctgtctcttatacacatctgacgctgccgacgatactccttgtgtagatctcggtggtcgccgtatcattaaaaaaaaaaaagcaatcgaacaagggaacagtacactcagaatatctccaaggtgcagacaaaacaccggagtccgacgtgtacacaccaaagactggagacacactgcgtacacgaccaatctcgtgtaactttcaatgatacgtctgtttcaagctgttgatctaaacggacttgaatttgacgtgcagtgacgttagtaccttcacggccggcaaatggagcgctgttgacacggtatgtcatttcaattgtcggttcgtcaacacgcagtacaagcaatgcttcttgatggtcatgcggtgtaactgtttcaccaacgttgatgtcttccatgcctgatactgcgattaagtcccctgcatgtgcttcttggatttcttcacgtttcaatccgaagaaaccaacgatttttgtaacacggaagtttttcacgctgccgtctaatttcaataaggatacttggtcgccgactttaatcgtacctctgaacacacgaccgataccgatacggccgacatagtcattgtagtctaataacgcaacttggaattgtagcggctcatctctgttatctacaggtgctggtacatattctaagattgtttcatataatgactgcatgttttcatcttgtttatcagcatctaagcttgctgtaccgttaacagcagatgcatatacgtgtacgctctagtcaactgtctcttgatattctggtatgatgtgtcgtgtcctggaggcggtgacccgcagtcgagacaagcgtacgcagctgtcattggcctcttgaaagacctggggtcgacatggtgggcggcggcggcgaaacacagacttgcgattgcgttgggtgttgccgccgatgagatcaaggcgagtgaggggaggtcggctacgcgatcggtgtctgaggctagtttttgtggtgagagtacgcctaataattccgggttaggaggggatggccatgcaatgggcgaggtggaggttgatgctgtgacagacggcttgctgtttccctacagggattatggcgacatggacttttggacgtcaattggcctgaacttcgactcggacgttgctccaggcatttacggcatcttctcggactccatgtagtatgaaataggtgatcatccccgagtaggataatctaattaatgctaaacaaatatcagccgagtgtaggatcgaatacgctgcctcagccttgaatacagttatacaattaatgtttggagcgaattacccataaaactttgtacattccttgccataacgaactatgacgcgaatatactaaaaagcgcggttcccaattcggtttgaatttctctttatatcttcttaaaccgctgaaacgatacaatgtattaaagttatcaaatacttttcctgctaaacgttcattccaatacgagtattcattttgacccacattagataaagtcgccatgcccatattaaaagcttgatacccctgttccttgctccacagtagcatatgcagatataccgcatccatcagcggtaaatctacttccggcagccagcggatcaaatcgacagaaatagcttcatcgttatgaatcggcattaagctgcaaaaagcaataattcgaccgtccgcctatcttaaaataccgaccggtgccttctctaaataatcatgtgtaaaatgcccgactgaaaaatgcatttcatttttgccgtccagccacgcatcactgacttgttctaacgctttcagcaaatcttgattaaacaaataggggaaacgttctttatttatcttatttggtattcaattggccgcttcttcgtcgaaggcctgagaactgatagtttaatgcttacaagtcatattagagttgcacagctcgtatcaattattctaatcattgttagtattatgcttataatatatagaagagttaagtttcatccttcaacttttaaaaattctggaccacttcaatggccaggtaaaaaggcgtagtgtttatagtgagacgattaaataaacaaaatcgattttccataaatcctttgtggcaagtttataaaatagtgaagtttcctaaggtatttaaacaaacttgtattattgaaatttctcgttttataccaagtatgagtttaaaacgttatatttatcgtaagtttttaaaaatgactataggtcagaatacatcatttgcatataaagtttcacctgacttgttttatccagagttaatttctgttggcaacaatagtgttattggttataatactgttgctaatacatagaattgaagacaaaattgtaagtcaaagttgtgtttaaggaaacggcgaacacagagatctacacaaggagtatcgtcggcagcgtcagatgtgtataagagacagttcgacaagttttgggattgttaagggttccgaggctcaacgtcaataaagcaattggaataaagcaattatgttatcctagaacaaaaaggagcatgacgttgaagtttataactaaaattttagatggattagcttttatttgtgtagctttattatttctaaagtatgcagttatactgtctcttatacacatctccgagcccacgagaccagagaggatctcgtatgccgtcttctgcttgaaaaaaaaaaatctacctgcatttatacagactaccgttcaatttctaccacctttccttcacatttcacttaccacttcttcattctcacttcttttcccctctccccacacacccacacataacttacctttactctctccttcttcattccgatcttcccggcagcgtcagatgtgtataagagacaggtccatgagtgaatctccactcttcgccaacataacaggatcaataacataaggaatatctgaatactttttcaaataactttgtatcagttccattgtttctttagttgcaatcattcctgtttttatagcatgtggtaattcatcatcaaaaacactatcaagttgctcttgtacccaacttgtttccaaattatgaatgctctgaacacctagagtattttgagcgacaatgctagtgattgctgccataccgtatacgccacatgaatggaaagattttaaatcagccattacccctgcgccaccagtgggatctgttccagctatcgttaatgctattttaggcttgttcatggttttctcctccaaaatcccatttttcatcgatataagccatattaaagaaatggcgctcatgtactgtactttgcaagaagttttctttgatttcttgcttttctttatcagtacattcttccgttatactcgcagtacacatcggctatgacttgcaagcacaaggtaaatccccattagatgatttacacactgttaaatcggttattacaaattctaaagttgcagttgctggcggtatcaaaccagatacaatcaaagacatcgtagctgaaggaccagtcttagtcattgacggcggcggaatcgcaaatgctgacgatccagtagaagctgctaaagcttgccgcgacgcagttgaagggaaataagttatggcagaattaaaaagccaacttattttagattagctgaaaacaacattagctaacgtaaaagaagaagatgttgaaaactttgaaaaagcaatcaaagacgcaaaaaacatctttgtcgcaggcaaaggccgctctggattcgtttctaacggcttcacaatgcgtttaaatcaacttgaacaacctgctttcatcatcggcggtattacaacaccttcgattcatgaaggcgacttatttatcgttatttcaggttcaggcagcacagaacacttacgcttattagctgaaaaagccaaaggcgaaggtgcacgtgttgcattagtaacaacaaaacctgactcaaaaatcggtgaacttgcagatacaacaatcgagttgccagccggcactaaatacgatgctgaaggttcagcacaaccattaggcagtcttttcgaacaatctgcacaattattcttagatgcagttgtcttaaacttaatggaaacattcaacggttactcagtatgcatcgcaatgttgcgtagactaacgggtatgacagacgtcataggaaacttctatcaagacgtcgtgcgatttatcatacgtgtcttaattccattcgcattcgtgttaagcatatttcttatcagtcaaggtacacctcaaacgttacatggcaatctagttgttgaaaccatgtcaggtgtgaaacaaaccattgcatatggaccgatggcttcattagagtcaattaaacatcttggaacgaatggtggagggttcctaggtgccaactcatccacaccatttgagaacccaacctattggtctaatttcgcagaggctttaagtatgatgttaattcctggatcgcttgtttttttatttggcagaatgctgaacgctaaacagcacatccatccccatgcggtaatggtctttattgcaatgtttacgatgtttgtcgtgcttttacttatttgtctacattatgaaactggaggaagtccgattttacaccacttaggaaggaagcgtaggtgcaggattgatgcaggggaataagtggtgggcatttggtagtatatgttgaagtaatatagtctgagagatgattattgactatagaggtgggctagagctcctgttttttttttttttttcaagcagaagacggcatacgagatcctctctggttcgtgggctcggagatgtgtataagagacaggattttgagtgtcattcgcgtggtatttttgtggattgatggtttttgaaaggtttttgaaacgagttgaaaacgagtttcttcttgtcttgatactatatagaaactgtctcttatacacatctccgagcccacgagaccagagaggatctcgtatgccgtcttctgcttgaaaaaaaaaaaaaacaaacaaaaaaagaagcaaagcactgtcttgaattcacaccacaacatacaagaaccaacatatcatgaaatcgcaacactgcatataagatgggtcttactctgtcgtttcattaatgaagactcccgcacgtgacgtcgacgtgtgtgtctctcactttaagtagcctcgtactcaccggtagcatctcttcactgtttgagtgtatgttcatgcactgatcacgtaattgatcatgcactgatcatgtggctgatcatgcactgatcacgtgcctgatcatacactgatcacgtgactgatcatgcagtgatcaggtggctgatcatgcactgatcacgtggctatcatgcattgctcacgtggcctgtcatgcagtgatcacgtggctatcatgcactactcacttggctgatcatgcaatgatcatgtagctaccatgtacaggtcacgtgaatgatcatacacccatcaggtgactgatcatgcactgatcacgtggctatcatgcactgatcacgtgactgatcatgcactgatcacgtctatatcatgcactgatcacatgactgcccatgcactgatcacgtggatgatcatacactaatcatgtgacagatcatgcactgatcacgtggctgatcatgcactgataccgtgactgagcatggactgatcacatgactatcatgtagtgatcacgtgacttaatggcgctgatcatgtgactgatcatgcgctgatcatgtttgctatcatacactgatcatgtgcctctggaggcaataaacaaagagctgagtaggcacgaatcaaacagtcagcaggcaataatcatggaactcagctgtgaggaatcatgctgctcagctggcaataatcaagcagctgagcaggcaggaattacacagcacagctggcaattgtcaagcagatgacaggcaggaatcgtgcagctcagctggcaattgtcaagcagatgagcagacactaatcacgcagctcagcaggcccggatcacgtgactgagcatgcactgttcacgtggctgatcatacactgatcacgtgattgatcatgcactgatcacatggatatcatgcactgatcacgtggctgatcatacactgttcacgtgtctgaccatgcactgatcacgtggctgatcatacactgctcctgtctcttatacacatctccgatcccacgagaccagagaggatctcgtatgccgtcttctgcctgaaaaaaaaaattaatagcctttcaacacatgatttatcttacaaatacaatatatgctttgccccaattcttatacaccactcccgctacgtcagcctacgcatcattctctccgccccattacgctccacacaaccacacactacactcatatccggcggtaatatgatatatgaaaaggcacctgccaagattaatttcactttagatgcactttataaaagaaatgatgggtttcatgaaggtgaaatggtaatgacaacggtggacttgaatgaccgcgttactgttgaacaacgcgaggatcagcgtgtagtcgtgaaggtggattataattttgtgcctgaaaatgcgaagaacctggcgtttcaagctgcgatgctgctgaaagcaacttatcaaatcccgcaaggtgtaacgattgtgctggataaagagattcctgtttcggcaggtcttggcggagggtcggcagatgcggctgcgaccatgcgtgcgatgaatcgattatttgaattgaatttgacgctggatgaattgagtacattagctgagcaagtaggttcagatgttccgttttgtatttacagcaagacagctgtatgtacagtgcatggcgagaaggtgcgtttgcttaaacggcctccgaaggcatgagtcaatatcggcagcccacacgttacgaccatcaataataccagcataaagtgacttgcttgagtcgaaatctcctgcttcaatttgttttaagttataaccattgtcatgaacaaagtctaaacctaatccgccaactggtaatgaacttaagaattttaaatgcacacgttcgaagtaagtttggatgactaacttttcacctaagtccgcttgagcaaaatattcataagcttcttttgtaatatcctcatagctctcgctatcgtcagttactaaaataggttcatcaatttgaatatattcagcaccagcttgaatcaatgatgataaaacttctttataaagtggaagcaatgtttgaactttttcttcaaatgattggttgtcacctttagagagtttgacgaatgtgataggtccaacaatcacagggtgagcattcacattaatagattgagcatatttgaatcgttctaataatgtatttttctcaacttttggttctacattgtcccattccggtacggcagtcactgactgtgtgtcacgatacggcgaccaccgagaccgacacaaggagtatcgtcggcagcgtcagatgtgtataagagacaggtcaaacccgcctgacactgtctcccaccacgataagtggtgcgggttagaaagccaacacagctagggtagtatcccaccaacgcctccacgtaagctagcgctcacgtttcaaaggctcctacctatcctgtacaagctgtgccgaatttcaatatcaggctacagtaaagctccacggggtctttccgtcctgtcgcgggtaacctgcatcttcacaggtactatgatttcaccgagtctctcgttgagacagtgcccaaatcgttacgcctttcgtgcgggtcggaacttacccgacaaggaatttcgctaccttaggacctgtctcttatacacatctccgagcccacgagaccagagaggatctcgtatgccgtcttctgcttgaaaaaaaaaaaaaaacatgacaaacttgtagccttctgtttcgcggtctgttaagtaatccgctaacactttgccttgctcatataacggcgccactaagccgtaaactttaccgttatgctgcgcacattcacccactgcatagatgttttcatcgctagtacgcataaagtcatctacaacaataccgcgttcaacctctaaaccagagtctttcgcttcttgtacgatgggacgaattcctacagccatgactactaaatcagctggtaattctttgccgtctgctaagcggataccttcaacgtcagtttcaccaagaatttctttagtattcgcacctaattcaaagcgcataccttgtctttctaaatcttcacgcagcatttcgcctgcttgacggtccagctgcatttccattaaccaatcagctaagtgtaccactgtaacgttcatgccttggtccagcaaacctctggcacattctaaaccaagcaagccgccgccgatgacgatagcttcttttttcgtttgcgcaatttcaatccattcgtggagccaacacggtttttaaccgcacgtaaaattcgataagcatgatgttcatcaccttcaaagtaaagcacggtatccaccatatgttcaagtaatcttgaaccggcaatttgtccttctttcgtaacatgaccgacgatgaacgttgcgatatccatttgctttgcgatattcattagactttgagtactttctcttacttgagatacagaacccggtgcagaactgatttcaggatgataaatagtttgtattgaatctactacaagtaaatctgctcgttcatccttaactgtttgatgaatgacttctaaatcagtctctgctaatacattgagttgactagaatcttcttctaagcggtcggcacgtagtttagtctgattgatagattcctcacctgtaatatataagacattcttattttgagataatgccgcacatatttgaagaagcaacgtagacttccctataccaggatcgccacctataagtacgagtgatccactgacaatccctccaccaaggactctgttaaattctttagaatccgttagaattctaggggtagattcatgtttaacattatcctacatagaatggtgagcttgcaccgccgaaacctcttagtaagtaagcagcaataacacctgtgaataatccgacaattacgccgaatgtgttagcacgttttgtgaaaatacctaccgcaaagatacctgcgagcggtacaccgaatagtcatgtcacaagtaagaatagatcccacaagttgttagatttagatgtgattaaatacatcgcaataccgtaacttaacaaaccggcaatcagtattgttaaacgtgcgaaacgtacttcggctttgtctgaacctctgctgaagaaacgtcttttgatatcttcagaaatacacgctgaaatagagttcaaacttgatgaaattgtggattgtgcagccgcaaagatcgccgcgatcaataagcctgccacaaatggcggcatttgcgtaatgatgaaatacggtacaacagaagatgtattaaagtccttcggcaacgctgcttcatgactatagaatgaatacatcattgttccgtcttctttcgtattataaatatagaaacttgctcttgctgttgaagattgattcaaccatttcattaacggctgcgcacagtggtgtcctgcacgaacggctacgccttcagtatctaaagctgtcgcagtatcgtgcgggtgaatacctttcaagttgaaagtgattacgcctgcacgtctgtctttcggcggtccgtaaatttctaaatcttcaattgcagacatttgttcatacgcatattcagtcagttctttctcatgtgcatgaattgcatcaaagcctaaattttcaaggtacttaatagcttctgctaaaccgattgcttgtgcaattaaaggtgtgcctgcttcgaatttagttggtaagtctgcccaagtagcatcatatttacttacaaagtcaagcatatcgccaccaaattcaacaggttccatgtctttaagtagttcacgcttaccatataacacaccaatacctgtaggtcctaacactttatgaccactaaaactgtaaaagtctgcatcaatatcttgcatatctaatgccatatgtggtgctgcttgtgcaccatcaacactaataatagcaccatgttgatgcgcaatttctgctattgttttcacatcattgattgtccctaatacattagaaactcttccatatactttttttacgtttttcacttctaataacatcacgaatgcccctttctcatttcacttattaccataaaataaaaaagtgccaacaacattcataatttcttacaaatattgttggcaaacttacaattttgaaagttagctaatcttcgttgggaaaatgtattttaaatgtcgtaccttcaccaagtcctgaatctacatcgacctcatgattcatatgattagaaatatgcttaacaatgaacaatcctatgccgcttgattcttcattaagtctgccgttgtaaccagaatagcctttatcaaatattttaggaatatctgctttactaatacctacaccattgtctttaatgattaatgtttgtttagcagaatcaaattcaatccaaatgtcttttccacgcgcgtacttcaaagcattatttaaaatttgttctatcataatagacgcccattgtgcatccgttaaaacagttgcttcacacttttcatagtgaattttagtatgttgttcgataaactgaattcgatatttcatgattagcggacgtattaattcattcactgtcactgatgtaattgtcatatcagattcttcgttgagtaattttaaataactcaatgctaagcttgtatagttatcaatttgaacaatttcttgtcttacgcgattgacaacattttcttcattacgttcgagtaatagttgtgacgctgtgataggtgttatggtattatgacgaagatcgtatggaacaagtactgactaaccttatagacaatgcgacacgttatacagcactaggagattctattaccatcactacagacgaagatgaagactatgatatcttgtatattgaagataccggcagcgttattgcgccagagcatgttgaattagtctttgatcgcttttatatagtagatgcatccagaaaacgcggtaaagagggaactggcttaggcttattcatcagccgcatgattgttgaagcgcaagatggtaccatgagtcttacaagcgaattgggcaaaggtactacatttattatcaaattgccgaaaccgcctaaaacacaatagacagcttaaaccttggagattcctccaaggtttttgattgcttatccttagttatgcaatcagattgaaattgtgagataaatcggatataataaataggaaaaataaaatataaatgaaattcatcttcggggtcgggtgaaagtcccaaccggcagtaaattctttgcaccttcttgcgcacgctttaaattaccgcgtgttaatgattgaaagagactgcccggcagcacataaacattgcggttttgttctaaagctaagtccactgtgatttgtgctccgcttctttccctcgactctgtaatcatcacaccttgtgctaatccgctgataatacgattgcgttctggaaacttatatttgttcggcggatcgcttggaatatattcactgatagttaatccttttctttctattatagaacgcactgcttttgtttctttcggataatgatggtgatgtccgaattgtaagacacctatcgtcggcatatgatgatgcaatgctgcttgatgtgcaaaacagtctccgccttttgctaaaccagagactatcacaaaaggatacaaagataaagcagccattaatactttcaaagctttctcagtatatgaggttgcttctctggaacctacaatacttaaatagttctgcccgcgcaataaatctaagtatcagaaacaacaccatcaaaagaaactgagccttcgcctgcacaatcaccagaaccaacacaaaacgaggaacaagcacaagttgcaccgcaaacagaaactgaacatcaagtacaaaatactaaagaaacagaagcggatactgaagaagtggttcaaacgcaagcaccgactgaatcacaacaaacagcaaaagttcctgaaaataatacaacaacacaaactcctaaaagtactacttcatctgtaacacctgagactgaaccgactgcacaacaacagccagaacccaaatcaacaacaaatacccagtctcagcagcaagtcaaggcacctgaccaaacagcaacagctcaaaattcagggcaagtacaatacaagaatcaagatccgactattttagtacatggctttaatggtttagtgggtgataatgcggcaccttccagcggcaactattggggcggcaaccatacagctatccaacaggcctggcgcgataatggctacaacgtacacgaaactaagcgcggtgcctacagcaacaactaggacgtcagctgcgtatgctgttcctggcgttgctgtgtactcggttatgtaggtggagcccgctgcacttgctgggtctactgtagtggcctttgctgctgctgagtagtatgcaattgctgatgttgaatcagatgcacttactgaggttgagtcgcttgcccttactggtgttgaagcgctcgcacttactgatgttgaatcagatgcacttactgacgctgagtagcttgcgcttactgatgttgaatcgctcgcgcttactgatgttgaatcagacgcgcttgttgactctgagtcagatgcacttactgatgttgaggcagatgcgcttgttgatgctgagtcgcacgcacttactgatgttgagtcagatgcacttactgatgctgagtcagccgcgcttgttgacgctgaatggctcgcacttgatgatgttgaataggctgagcttactgacgctcggtgtgactcgcttgatgacgctgagtctgcggcaactgctgcggttgcattcagcacaattccacagaccactgcgcgcaccagcacaacggcttaagcaagtacgtcgactcacaaagcgcgtcaacaagcgcgtctgattcaacatcagcaagtgcgagcgattcagcgtcagtaagtgcatctgactcagcgtcagtaagcgcatctgactcaacatcagtaagtgcatctgactcagcgtcaacaagtgcatctgattcaacatcagtaagcgcaaccgactcagcgtcagtaagtgcatctgattcaacatcagcaagtgcgagcgactcagcatcagtaagcgcatctgactcagcgtcagtaagcgcaaccgactcagcgtcaccaagcgcgtctgattcaacatcagcaagtgcgaccgattcagcgtcagtaagcgcatcagactcagcgtcagtaacagcatcgcattccacgtcagacagaccggtcgattcacacgcgacaagccctaccgtacccccccccgtccgacaggcccgtgc

(The sequence listing continues in the following parts.)
